(19) United States
(12) Patent Application Publication
(10) Pub. No.: US 2024/0287517 A1
(43) Pub. Date: Aug. 29, 2024

(54) TREATMENT OF PLIN1 RELATED DISEASES AND DISORDERS

(71) Applicant: Empirico Inc., San Diego, CA (US)

(72) Inventors: Omri GOTTESMAN, San Diego, CA (US); Shannon BRUSE, San Diego, CA (US); Paul BUSKE, Madison, WI (US); Brian CAJES, San Diego, CA (US); David JAKUBOSKY, San Diego, CA (US); Sarah KLEINSTEIN, San Diego, CA (US); David LEWIS, Madison, WI (US); David ROZEMA, Cross Plains, WI (US); John VEKICH, San Diego, CA (US)

(21) Appl. No.: 18/568,170

(22) PCT Filed: Jun. 14, 2022
(86) PCT No.: PCT/US2022/033479

§ 371 Date: Dec. 7, 2023

Related U.S. Application Data
(60) Provisional application No. 63/211,374, filed on Jun. 16, 2021.
(60) Provisional application No. 63/324,460, filed on Mar. 28, 2022.

(51) Int. Cl. C12N 15/113; A61P 3/06

(52) U.S. Cl. CPC C12N 15/113; A61P 3/06; C12N 2310/14; C12N 2310/315; C12N 2310/321; C12N 2310/322

(57) ABSTRACT

Disclosed herein are compositions comprising an oligonucleotide that targets PLIN1. The oligonucleotide may include a small interfering RNA (siRNA) or an antisense oligonucleotide (ASO). Also provided herein are methods of treating conditions associated with PLIN1 gene mutations that include providing an oligonucleotide that targets PLIN1 in a subject.

### CROSS-REFERENCE

[0001] This application claims the benefit of U.S. Provisional Application No, 63/211,374, filed Jun. 16, 2021, and U.S. Provisional Application No, 63/324,460, filed Mar. 28, 2022, which applications are incorporated herein by reference in their entireties.

### BACKGROUND

[0002] Cardiometabolic disorders are becoming increasingly abundant, and may affect a wide variety of people. Improved therapeutics are needed for treating these disorders.

### SUMMARY

[0003] Described herein are compositions comprising an oligonucleotide that targets a perilipin. Described herein are compositions comprising an oligonucleotide that targets a perilipin and when administered to a subject in an effective amount reduces a perilipin mRNA or protein level. The perilipin may include perilipin 1 (PLIN1). Described herein are compositions comprising an oligonucleotide that targets PLIN1 and when administered to a subject in an effective amount reduces a PLIN1 mRNA or protein level. Described herein, in some embodiments, are compositions comprising an oligonucleotide that targets PLIN1 and when administered to a subject in an effective amount decreases circulating cholesterol, triglycerides, glucose, hemoglobin A1c, apolipoprotein B (APOB), alanine aminotransferase, aspartate aminotransferase, alkaline phosphatase, or gamma-glutamyl transferase in a subject. In some embodiments, the cholesterol comprises total cholesterol, low density lipoprotein cholesterol, or non-high density lipoprotein cholesterol. In some embodiments, the decrease is by about 10% or more, as compared to prior to administration. Described herein, in some embodiments, are compositions comprising an oligonucleotide that targets PLIN1 and when administered to a subject in an effective amount decreases systolic blood pressure or diastolic blood pressure in a subject. In some embodiments, the decrease is by about 10% or more, as compared to prior to administration. Described herein, in some embodiments, are compositions comprising an oligonucleotide that targets PLIN1 and when administered to a subject in an effective amount decreases a liver fibrosis score, non-alcoholic fatty liver disease (NAFLD) fibrosis score. NAFLD activity score, or liver fat percentage in a subject. In some embodiments, the decrease is by about 10% or more, as compared to prior to administration. Described herein, in some embodiments, are compositions comprising an oligonucleotide that targets PLIN1 and when administered to a subject in an effective amount increases circulating high density lipoprotein cholesterol or apolipoprotein A1 in a subject. In some embodiments, the increase is by about 10% or more, as compared to prior to administration. Described herein, in some embodiments, are compositions comprising an oligonucleotide that targets PLIN1 and when administered to a subject in an effective amount increases left ventricular ejection fraction in a subject. In some embodiments, the increase is by about 10% or more, as compared to prior to administration. Described herein, in some embodiments, are compositions comprising an oligonucleotide that targets PLIN1 and when administered to a subject in an effective amount increases insulin sensitivity in a subject. In some embodiments, the increase is by about 10% or more, as compared to prior to administration. In some embodiments, the oligonucleotide comprises a modified internucleoside linkage. In some embodiments, the modified internucleoside linkage comprises alkylphosphonate, phosphorothioate, methylphosphonate, phosphorodithioate, alkylphosphonothioate, phosphoramidate, carbamate, carbonate, phosphate triester, acetamidate, or carboxymethyl ester, or a combination thereof. In some embodiments, the modified internucleoside linkage comprises one or more phosphorothioate linkages. In some embodiments, the oligonucleotide comprises 1, 2, 3, 4, 5, 6, 7, 8, 9, 10, 11, 12, 13, 14, 15, 16, 17, 18, 19, or 20 modified internucleoside linkages. In some embodiments, the oligonucleotide comprises a modified nucleoside. In some embodiments, the modified nucleoside comprises a locked nucleic acid (LNA), hexitol nucleic acid (HLA), cyclohexene nucleic acid (CeNA), 2′-methoxyethyl. 2′-O-alkyl, 2′-O-allyl, 2′-O-allyl, 2′-fluoro, or 2′-deoxy, or a combination thereof. In some embodiments, the modified nucleoside comprises a LNA. In some embodiments, the modified nucleoside comprises a 2′,4′ constrained ethyl nucleic acid. In some embodiments, the modified nucleoside comprises a 2′-O-methyl nucleoside, 2′-deoxyfluoro nucleoside, 2′-O—N-methylacetamido (2′-O-NMA) nucleoside, a 2′-O-dimethylaminoethoxyethyl (2′-O-DMAEOE) nucleoside, 2′-O-aminopropyl (2′-O-AP) nucleoside, or 2′-ara-F, or a combination thereof. In some embodiments, the modified nucleoside comprises one or more 2′ fluoro modified nucleosides. In some embodiments, the modified nucleoside comprises a 2′ O-alkyl modified nucleoside. In some embodiments, the oligonucleotide comprises 1, 2, 3, 4, 5, 6, 7, 8, 9, 10, 11, 12, 13, 14, 15, 16, 17, 18, 19, 20, or 21 modified nucleosides. In some embodiments, the oligonucleotide comprises a lipid attached at a 3′ or 5′ terminus of the oligonucleotide. In some embodiments, the lipid comprises cholesterol, myristoyl, palmitoyl, stearoyl, lithocholyl, docosanoyl, docosahexaenoyl, myristyl, palmityl stearyl, or α-tocopherol, or a combination thereof. In some embodiments, the oligonucleotide comprises a sugar moiety attached at a 3′ or 5′ terminus of the oligonucleotide. In some embodiments, the sugar comprises N-acetylgalactosamine (GalNAc), N-acetylglucosamine (GlcNAc), or mannose. In some embodiments, the oligonucleotide comprises a small interfering RNA (siRNA) comprising a sense strand and an antisense strand. In some embodiments, the sense strand is 12-30 nucleosides in length. In some embodiments, the antisense strand is 12-30 nucleosides in length. Described herein, in some embodiments, are compositions comprising an oligonucleotide that inhibits the expression of PLIN1, wherein the oligonucleotide comprises an siRNA comprising a sense strand and an antisense strand, each strand is independently about 12-30 nucleosides in length, and at least one of the sense strand and the antisense strand comprises a nucleoside sequence comprising about 12-30 contiguous nucleosides of SEQ ID NO: 6014. In some embodiments, any one of the following is true with regard to the sense strand: all purines comprise 2′ fluoro modified purines, and all pyrimidines comprise a mixture of 2′ fluoro and 2′ methyl modified pyrimidines; all purines comprise 2′ methyl modified purines, and all pyrimidines comprise a mixture of 2° fluoro and 2′ methyl modified pyrimidines; all purines comprise 2′ fluoro modified purines, and all pyrimidines comprise 2′ methyl modified pyrimidines; all pyrimidines comprise 2′ fluoro modified pyrimidines, and all purines comprise a mixture of 2′ fluoro and 2′ methyl modified purines; all pyrimidines comprise 2′ methyl modified pyrimidines, and all purines comprise a mixture of 2′ fluoro and 2′ methyl modified purines; or all pyrimidines comprise 2′ fluoro modified pyrimidines, and all purines comprise 2′ methyl modified purines. In some embodiments, the sense strand comprises any one of modification patterns 1S, 2S. 3S, 4S, 5S, 6S, 7S, 8S, 9S, 10S, 11S, 12S, 13S, 14S, 15S, 16S, 17S, 18S, 19S, 20S, 21S, 22S, 23S. 24S, 25S, 26S, 27S, 28S, 29S, 30S, 31S, 32S, 33S, 34S, 35S, 36S, 37S, 38S, 39S, 40S, 41S, 42S, 43S. 44S, 45S, 46S, 47S, 48S, 49S, or 50S. In some embodiments, any one of the following is true with regard to the antisense strand; all purines comprise 2′ fluoro modified purines, and all pyrimidines comprise a mixture of 2′ fluoro and 2′ methyl modified pyrimidines; all purines comprise 2′ methyl modified purines, and all pyrimidines comprise a mixture of 2′ fluoro and 2′ methyl modified pyrimidines; all purines comprise 2′ methyl modified purines, and all pyrimidines comprise 2′ fluoro modified pyrimidines; all pyrimidines comprise 2′ fluoro modified pyrimidines, and all purines comprise a mixture of 2′ fluoro and 2′ methyl modified purines; all pyrimidines comprise 2′ methyl modified pyrimidines, and all purines comprise a mixture of 2′ fluoro and 2′ methyl modified purines; or all pyrimidines comprise 2′ methyl modified pyrimidines, and all purines comprise 2′ fluoro modified purines. In some embodiments, the antisense strand comprises any one of modification patterns 1AS, 2AS, 3AS, 4AS, 5AS, 6AS, 7AS, 8AS, 9AS, or 10AS. In some embodiments, the sense strand comprises the nucleic acid sequence of any one of SEQ ID NOs: 1-2898, and the antisense strand comprises the nucleic acid sequence of any one of SEQ ID NOs: 2899-5796. In some embodiments, the oligonucleotide comprises an antisense oligonucleotide (ASO). In some embodiments, the ASO is 12-30 nucleosides in length. Described herein, in some embodiments, are compositions comprising an oligonucleotide that inhibits the expression of PLIN1, wherein the oligonucleotide comprises an ASO about 12-30 nucleosides in length and a nucleoside sequence complementary to about 12-30 contiguous nucleosides of SEQ ID NO: 6014. Some embodiments include a pharmaceutically acceptable carrier. Described herein, in some embodiments, are methods of treating a subject having a cardiometabolic disorder, comprising administering an effective amount of the composition to the subject. In some embodiments, the cardiometabolic disorder comprises hyperlipidemia, hypertriglyceridemia, cardiovascular disease, coronary artery disease, myocardial infarction, heart failure, cerebrovascular disease, peripheral vascular disease, peripheral arterial disease, stroke, hypertension, diabetes, NAFLD, or non-alcoholic steatohepatitis.

### BRIEF DESCRIPTION OF THE DRAWINGS

[0004] FIG. 1 is a PLIN1 western blot image.

### DETAILED DESCRIPTION

[0005] Large-scale human genetic data can improve the success rate of pharmaceutical discovery and development. A Genome Wide Association Study (GWAS) detects associations between genetic variants and traits in a population sample, and this improves understanding of the biology of disease and provides evidence of applicable treatments. A GWAS generally utilizes genotyping and/or sequencing data, and often involves an evaluation of millions of genetic variants that are relatively evenly distributed across the genome. The most common GWAS design is the case-control study, which involves comparing variant frequencies in cases versus controls. If a variant has a significantly different frequency in cases versus controls, that variant is considered associated with disease. Association statistics used in a GWAS include p-values, as a measure of statistical significance; odds ratios (OR), as a measure of effect size; or beta coefficients (beta), as a measure of effect size. Researchers often assume an additive genetic model and calculate an allelic odds ratio, which is the increased (or decreased) risk of disease conferred by each additional copy of an allele (compared to carrying no copies of that allele). An additional concept in design and interpretation of GWAS is that of linkage disequilibrium, which is the non-random association of alleles. The presence of linkage disequilibrium can obfuscate which variant is “causal.”

[0006] Functional annotation of variants and/or wet lab experimentation is used to identify a causal genetic variant identified via GWAS, and in many cases leads to identification of disease-causing genes. In particular, understanding the functional effect of a causal genetic variant (for example, loss of protein function, gain of protein function, increase in gene expression, or decrease in gene expression) allows that variant to be used as a proxy for therapeutic modulation of the target gene, or to gain insight into potential therapeutic efficacy and safety of a therapeutic that modulates that target.

[0007] Identification of such gene-disease associations has provided insights into disease biology and is used to identify novel therapeutic targets for the pharmaceutical industry. In order to translate the therapeutic insights derived from human genetics, disease biology in patients is exogenously ‘programmed’ into replicating the observation from human genetics. There are several options for therapeutic modalities that may be brought to bear in translating therapeutic targets identified via human genetics into novel medicines. These include well established therapeutic modalities such as small molecules and monoclonal antibodies, maturing modalities such as oligonucleotides, and emerging modalities such as gene therapy and gene editing. The choice of therapeutic modality depends on factors such as the location of a target (for example, intracellular, extracellular, or secreted), a relevant tissue (for example, lung or liver) and a relevant indication.

[0008] The PLIN1 gene is located on chromosome 15, and encodes perilipin 1 (PLIN1). PLIN1 may include 522 amino acids and have a mass of about 56 kDa. PLIN1 may be an intracellular protein. PLIN1 may associate with the surface of lipid droplets. Phosphorylation of PLIN1 may be involved in mobilization of fats in adipose tissue. PLIN1 may be expressed in liver cells such as hepatocytes, or in fat cells such as white adipocytes. Decreasing PLIN1 expression may increase lipolysis. Alternatively spliced mRNA transcript variants varying in the 5′ UTR, but encoding the same protein, have been found for PLIN1. An example of a PLIN1 amino acid sequence, and further description of PLIN1 is included at uniprot.org under accession no, 060240 (last modified May 5, 2009).

[0009] Here it is shown that genetic variant cause inactivation of PLIN1 result in protective associations for cardiometabolic phenotypes including circulating triglyceride levels, circulating high-density lipoprotein (HDL) levels, circulating low density lipoprotein (LDL) levels, statin medication use, myocardial infarction, angina, family history of stroke, and hypertension. Therefore, inhibition of PLIN1 may serve as a therapeutic for treatment of cardiometabolic diseases and disorders such as hyperlipidemia, hypertriglyceridemia, cardiovascular disease, coronary artery disease, peripheral vascular disease, peripheral arterial disease, myocardial infarction, heart failure, cerebrovascular disease, stroke, hypertension, diabetes, non-alcoholic fatty liver disease (NAFLD), or non-alcoholic steatohepatitis (NASH).

[0010] Disclosed herein are compositions comprising an oligonucleotide that targets PLIN1. Where inhibition or targeting of PLIN1 is disclosed, it is contemplated that some embodiments may include inhibiting or targeting a PLIN1 protein or PLIN1 RNA. For example, by inhibiting or targeting an RNA (e.g. mRNA) encoded by the PLIN1 gene using an oligonucleotide described herein, the PLIN1 protein may be inhibited or targeted as a result of there being less production of the PLIN1 protein by translation of the PLIN1 RNA; or a PLIN1 protein may be targeted or inhibited by an oligonucleotide that binds or interacts with a PLIN1 RNA and reduces production of the PLIN1 protein from the PLIN1 RNA. Thus, targeting PLIN1 may refer to binding a PLIN1 RNA and reducing PLIN1 RNA or protein levels. The oligonucleotide may include a small interfering RNA (siRNA) or an antisense oligonucleotide (ASO). Administration of the oligonucleotide to a subject may improve (e.g. decrease or increase, depending on the indication or parameter) total circulating cholesterol, circulating non-HDL cholesterol, circulating triglycerides, circulating LDL, circulating hemoglobin A1c, fasting circulating glucose, systolic blood pressure, diastolic blood pressure, circulating alanine aminotransferase (ALT), circulating aspartate aminotransferase (AST), blood alkaline phosphatase (ALP), gamma-glutamyl transferase (GGT). NAFLD fibrosis score, liver fat percentage, liver fibrosis score, or NAFLD activity score, or increase circulating HDL, circulating apolipoprotein A1 (ApoA1), circulating APOB, left ventricular ejection fraction, or insulin sensitivity in the subject. Also provided herein are methods of treating a cardiometabolic disorder by providing an oligonucleotide that targets PLIN1 to a subject in need thereof.

### I. Compositions

[0011] Disclosed herein, in some embodiments, are compositions comprising an oligonucleotide. In some embodiments, the composition comprises an oligonucleotide that targets PLIN1. In some embodiments, the composition consists of an oligonucleotide that targets PLIN1. In some embodiments, the oligonucleotide reduces PLIN1 mRNA expression in the subject. In some embodiments, the oligonucleotide reduces PLIN1 protein expression in the subject. The oligonucleotide may include a small interfering RNA (siRNA) described herein. The oligonucleotide may include an antisense oligonucleotide (ASO) described herein. In some embodiments, a composition described herein is used in a method of treating a disorder in a subject in need thereof. Some embodiments relate to a composition comprising an oligonucleotide for use in a method of treating a disorder as described herein. Some embodiments relate to use of a composition comprising an oligonucleotide, in a method of treating a disorder as described herein.

[0012] Some embodiments include a composition comprising an oligonucleotide that targets PLIN1 and when administered to a subject in an effective amount decreases PLIN1 mRNA or protein levels in a cell, fluid or tissue. In some embodiments, the composition comprises an oligonucleotide that targets PLIN1 and when administered to a subject in an effective amount decreases PLIN1 mRNA levels in a cell or tissue. In some embodiments, the cell is a hepatocyte. In some embodiments, the cell is an adipocyte. In some embodiments, the cell is an preadipocyte. In some embodiments, the tissue is liver tissue. In some embodiments, the tissue is adipose tissue. In some embodiments, the PLIN1 mRNA levels are decreased by about 2.5% or more, about 5% or more, or about 7.5% or more, as compared to prior to administration. In some embodiments, the PLIN1 mRNA levels are decreased by about 10% or more, as compared to prior to administration. In some embodiments, the PLIN1 mRNA levels are decreased by about 20% or more, about 30% or more, about 40% or more, about 50% or more, about 60% or more, about 70% or more, about 80% or more, about 90% or more, or about 100%, as compared to prior to administration. In some embodiments, the PLIN1 mRNA levels are decreased by no more than about 2.5%, no more than about 5%, or no more than about 7.5%, as compared to prior to administration. In some embodiments, the PLIN1 mRNA levels are decreased by no more than about 10%, as compared to prior to administration. In some embodiments, the PLIN1 mRNA levels are decreased by no more than about 20%, no more than about 30%, no more than about 40%, no more than about 50%, no more than about 60%, no more than about 70%, no more than about 80%, or no more than about 90%, as compared to prior to administration. In some embodiments, the PLIN1 mRNA levels are decreased by 2.5%, 5%, 7.5%, 10%, 15%, 20%, 25%, 30%, 35%, 40%, 45%, 50%, 55%, 60%, 65%, 70%, 75%, 80%, 85%, 90%, 95%, or 100%, or by a range defined by any of the two aforementioned percentages.

[0013] In some embodiments, the composition comprises an oligonucleotide that targets PLIN1 and when administered to a subject in an effective amount decreases PLIN1 protein levels in a cell, fluid or tissue. In some embodiments, the cell is a hepatocyte. In some embodiments, the cell is an adipocyte. In some embodiments, the tissue is liver tissue. In some embodiments, the tissue is adipose tissue. In some embodiments, the PLIN1 protein levels are decreased by about 2.5% or more, about 5% or more, or about 7.5% or more, as compared to prior to administration. In some embodiments, the PLIN1 protein levels are decreased by about 10% or more, as compared to prior to administration. In some embodiments, the PLIN1 protein levels are decreased by about 20% or more, about 30% or more, about 40% or more, about 50% or more, about 60% or more, about 70% or more, about 80% or more, about 90% or more, or about 100%, as compared to prior to administration. In some embodiments, the PLIN1 protein levels are decreased by no more than about 2.5%, no more than about 5%, or no more than about 7.5%, as compared to prior to administration. In some embodiments the PLIN1 protein levels are decreased by no more than about 10%, as compared to prior to administration. In some embodiments, the PLIN1 protein levels are decreased by no more than about 20%, no more than about 30%, no more than about 40%, no more than about 50%, no more than about 60%, no more than about 70%, no more than about 80%, or no more than about 90%, as compared to prior to administration. In some embodiments, the PLIN1 protein levels are decreased by 2.5%, 5%, 7.5%, 10%, 15%, 20%, 25%, 30%, 35%, 40%, 45%, 50%, 55%, 60%, 65%, 70%, 75%, 80%, 85%, 90%, 95%, or 100%, or by a range defined by any of the two aforementioned percentages.

[0014] In some embodiments, the composition comprises an oligonucleotide that targets PLIN1 and when administered to a subject in an effective amount diminishes a cardiometabolic disease phenotype. The cardiometabolic disease may include hyperlipidemia, hypertriglyceridemia, cardiovascular disease, coronary artery disease, myocardial infarction, heart failure, cerebrovascular disease, stroke, hypertension, diabetes, non-alcoholic fatty liver disease (NAFLD), or non-alcoholic steatohepatitis (NASH). In some embodiments, the cardiometabolic disease phenotype is decreased by about 2.5% or more, about 5% or more, or about 7.5% or more, as compared to prior to administration. In some embodiments, the cardiometabolic disease phenotype is decreased by about 10% or more, as compared to prior to administration. In some embodiments, the cardiometabolic disease phenotype is decreased by about 20% or more, about 30% or more, about 40% or more, about 50% or more, about 60% or more, about 70% or more, about 80% or more, about 90% or more, or about 100%, as compared to prior to administration. In some embodiments, the cardiometabolic disease phenotype is decreased by no more than about 2.5%, no more than about 5%, or no more than about 7.5%, as compared to prior to administration. In some embodiments, the cardiometabolic disease phenotype is decreased by no more than about 10%, as compared to prior to administration. In some embodiments, the cardiometabolic disease phenotype is decreased by no more than about 20%, no more than about 30%, no more than about 40%, no more than about 50%, no more than about 60%, no more than about 70%, no more than about 80%, or no more than about 90%, as compared to prior to administration. In some embodiments, the cardiometabolic disease phenotype is decreased by 2.5%, 5%, 7.5%, 10%, 15%, 20%, 25%, 30%, 35%, 40%, 45%, 50%, 55%, 60%, 65%, 70%, 75%, 80%, 85%, 90%, 95%, or 100%, or by a range defined by any of the two aforementioned percentages.

[0015] In some embodiments, the composition comprises an oligonucleotide that targets PLIN1 and when administered to a subject in an effective amount enhances a protective phenotype against a cardiometabolic disease in the subject. The cardiometabolic disease may include hyperlipidemia, hypertriglyceridemia, cardiovascular disease, coronary artery disease, myocardial infarction, heart failure, cerebrovascular disease, stroke, hypertension, diabetes, non-alcoholic fatty liver disease (NAFLD), or non-alcoholic steatohepatitis (NASH). In some embodiments, the protective phenotype is increased by about 2.5% or more, about 5% or more, or about 7.5% or more, as compared to prior to administration. In some embodiments, the protective phenotype is increased by about 10% or more as compared to prior to administration. In some embodiments, the protective phenotype is increased by about 20% or more, about 30% or more, about 40% or more, about 50% or more, about 60% or more, about 70% or more, about 80% or more about 90% or more, or about 100% or more, as compared to prior to administration. In some embodiments, the protective phenotype is increased by about 200% or more, about 300% or more, about 400% or more, about 500% or more, about 600% or more, about 700% or more, about 800% or more about 900% or more, or about 1000% or more, as compared to prior to administration. In some embodiments, the protective phenotype is increased by no more than about 2.5%, no more than about 5%, or no more than about 7.5%, as compared to prior to administration. In some embodiments, the protective phenotype is increased by no more than about 10%, as compared to prior to administration. In some embodiments, the protective phenotype is increased by no more than about 20%, no more than about 30%, no more than about 40%, no more than about 50%, no more than about 60%, no more than about 70%, no more than about 80%, no more than about 90%, or no more than about 100%, as compared to prior to administration. In some embodiments, the protective phenotype is increased by no more than about 200%, no more than about 300%, no more than about 400%, no more than about 500%, no more than about 600%, no more than about 700%, no more than about 800%, no more than about 900%, or no more than about 1000%, as compared to prior to administration. In some embodiments, the protective phenotype is increased by 2.5%, 5%, 7.5%, 10%, 15%, 20%, 25%, 30%, 35%, 40%, 45%, 50%, 55%, 60%, 65%, 70%, 75%, 80%, 85%, 90%, 95%, 100%, 150%, 200%, 250%, 300%, 400%, 500%, 600%, 700%, 800%, 900%, or 1000%, or by a range defined by any of the two aforementioned percentages.

[0016] In some embodiments, the composition comprises an oligonucleotide that targets PLIN1 and when administered to a subject in an effective amount decreases circulating cholesterol in the subject. The circulating cholesterol may include total cholesterol or non-high density lipoprotein (HDL) cholesterol. The circulating cholesterol may include total cholesterol. The circulating cholesterol may include non-HDL cholesterol. In some embodiments, the circulating cholesterol is decreased by about 2.5% or more, about 5% or more, or about 7.5% or more, as compared to prior to administration. In some embodiments, the circulating cholesterol is decreased by about 10% or more, as compared to prior to administration. In some embodiments, the circulating cholesterol is decreased by about 20% or more, about 30% or more, about 40% or more, about 50% or more, about 60% or more, about 70% or more, about 80% or more, or about 90% or more, as compared to prior to administration. In some embodiments, the circulating cholesterol is decreased by no more than about 2.5%, no more than about 5%, or no more than about 7.5%, as compared to prior to administration. In some embodiments, the circulating cholesterol is decreased by no more than about 10%, as compared to prior to administration. In some embodiments, the circulating cholesterol is decreased by no more than about 20%, no more than about 30%, no more than about 40%, no more than about 50%, no more than about 60%, no more than about 70%, no more than about 80%, or no more than about 90%, as compared to prior to administration. In some embodiments, the circulating cholesterol is decreased by 2.5%, 5%, 7.5%, 10%, 15%, 20%, 25%, 30%, 35%, 40%, 45%, 50%, 55%, 60%, 65%, 70%, 75%, 80%, 85%, or 90%, or by a range defined by any of the two aforementioned percentages.

[0017] In some embodiments, the composition comprises an oligonucleotide that targets PLIN1 and when administered to a subject in an effective amount decreases circulating low density lipoproteins (LDL) in the subject. In some embodiments, the circulating LDL is decreased by about 2.5% or more, about 5% or more, or about 7.5% or more, as compared to prior to administration. In some embodiments, the circulating LDL is decreased by about 10% or more, as compared to prior to administration. In some embodiments, the circulating LDL is decreased by about 20% or more, about 30% or more, about 40% or more, about 50% or more, about 60% or more, about 70% or more, about 80% or more, or about 90% or more, as compared to prior to administration. In some embodiments, the circulating LDL is decreased by no more than about 2.5%, no more than about 5%, or no more than about 7.5%, as compared to prior to administration. In some embodiments, the circulating LDL is decreased by no more than about 10%, as compared to prior to administration. In some embodiments, the circulating LDL is decreased by no more than about 20%, no more than about 30%, no more than about 40%, no more than about 50%, no more than about 60%, no more than about 70%, no more than about 80%, or no more than about 90%, as compared to prior to administration. In some embodiments, the circulating LDL is decreased by 2.5%, 5%, 7.5%, 10%, 15%, 20%, 25%, 30%, 35%, 40%, 45%, 50%, 55%, 60%, 65%, 70%, 75%, 80%, 85%, or 90%, or by a range defined by any of the two aforementioned percentages.

[0018] In some embodiments, the composition comprises an oligonucleotide that targets PLIN1 and when administered to a subject in an effective amount decreases circulating triglycerides in the subject. In some embodiments, the circulating triglycerides are decreased by about 2.5% or more, about 5% or more, or about 7.5% or more, as compared to prior to administration. In some embodiments, the circulating triglycerides are decreased by about 10% or more, as compared to prior to administration. In some embodiments, the circulating triglycerides are decreased by about 20% or more, about 30% or more, about 40% or more, about 50% or more, about 60% or more, about 70% or more, about 80% or more, or about 90% or more, as compared to prior to administration. In some embodiments, the circulating triglycerides are decreased by no more than about 2.5%, no more than about 5%, or no more than about 7.5%, as compared to prior to administration. In some embodiments, the circulating triglycerides are decreased by no more than about 10%, as compared to prior to administration. In some embodiments, the circulating triglycerides are decreased by no more than about 20%, no more than about 30%, no more than about 40%, no more than about 50%, no more than about 60%, no more than about 70%, no more than about 80%, or no more than about 90%, as compared to prior to administration. In some embodiments, the circulating triglycerides are decreased by 2.5%, 5%, 7.5%, 10%, 15%, 20%, 25%, 30%, 35%, 40%, 45%, 50%, 55%, 60%, 65%, 70%, 75%, 80%, 85%, or 90%, or by a range defined by any of the two aforementioned percentages.

[0019] In some embodiments, the composition comprises an oligonucleotide that targets PLIN1 and when administered to a subject in an effective amount decreases circulating hemoglobin A1c in the subject. In some embodiments, the circulating hemoglobin A1c is decreased by about 2.5% or more, about 5% or more, or about 7.5% or more, as compared to prior to administration. In some embodiments, the circulating hemoglobin A1c is decreased by about 10% or more, as compared to prior to administration. In some embodiments, the circulating hemoglobin A1c is decreased by about 20% or more, about 30% or more, about 40% or more, about 50% or more, about 60% or more, about 70% or more, about 80% or more, or about 90% or more, as compared to prior to administration. In some embodiments, the circulating hemoglobin A1c is decreased by no more than about 2.5%, no more than about 5%, or no more than about 7.5%, as compared to prior to administration. In some embodiments, the circulating hemoglobin A1c is decreased by no more than about 10%, as compared to prior to administration. In some embodiments, the circulating hemoglobin A1c is decreased by no more than about 20%, no more than about 30%, no more than about 40%, no more than about 50%, no more than about 60%, no more than about 70%, no more than about 80%, or no more than about 90%, as compared to prior to administration. In some embodiments, the circulating hemoglobin A1c is decreased by 2.5%, 5%, 7.5%, 10%, 15%, 20%, 25%, 30%, 35%, 40%, 45%, 50%, 55%, 60%, 65%, 70%, 75%, 80%, 85%, or 90%, or by a range defined by any of the two aforementioned percentages.

[0020] In some embodiments, the composition comprises an oligonucleotide that targets PLIN1 and when administered to a subject in an effective amount decreases circulating Apolipoprotein B (APOB) in the subject. In some embodiments, the circulating APOB is decreased by about 2.5% or more, about 5% or more, or about 7.5% or more, as compared to prior to administration. In some embodiments, the circulating APOB is decreased by about 10% or more, as compared to prior to administration. In some embodiments, the circulating APOB is decreased by about 20% or more, about 30% or more, about 40% or more, about 50% or more, about 60% or more, about 70% or more, about 80% or more, or about 90% or more, as compared to prior to administration. In some embodiments, the circulating APOB is decreased by no more than about 2.5%, no more than about 5%, or no more than about 7.5%, as compared to prior to administration. In some embodiments, the circulating APOB is decreased by no more than about 10%, as compared to prior to administration. In some embodiments, the circulating APOB is decreased by no more than about 20%, no more than about 30%, no more than about 40%, no more than about 50%, no more than about 60%, no more than about 70%, no more than about 80%, or no more than about 90%, as compared to prior to administration. In some embodiments, the circulating APOB is decreased by 2.5%, 5%, 7.5%, 10%, 15%, 20%, 25%, 30%, 35%, 40%, 45%, 50%, 55%, 60%, 65%, 70%, 75%, 80%, 85%, or 90%, or by a range defined by any of the two aforementioned percentages.

[0021] In some embodiments, the composition comprises an oligonucleotide that targets PLIN1 and when administered to a subject in an effective amount decreases circulating glucose in the subject. The circulating glucose may be fasting circulating glucose. In some embodiments, the circulating glucose is decreased by about 2.5% or more, about 5% or more, or about 7.5% or more, as compared to prior to administration. In some embodiments, the circulating glucose is decreased by about 10% or more, as compared to prior to administration. In some embodiments, the circulating glucose is decreased by about 20% or more, about 30% or more, about 40% or more, about 50% or more, about 60% or more, about 70% or more, about 80% or more, or about 90% or more, as compared to prior to administration. In some embodiments, the circulating glucose is decreased by no more than about 2.5%, no more than about 5%, or no more than about 7.5%, as compared to prior to administration. In some embodiments, the circulating glucose is decreased by no more than about 10%, as compared to prior to administration. In some embodiments, the circulating glucose is decreased by no more than about 20%, no more than about 30%, no more than about 40%, no more than about 50%, no more than about 60%, no more than about 70%, no more than about 80%, or no more than about 90%, as compared to prior to administration. In some embodiments, the circulating glucose is decreased by 2.5%, 5%, 7.5%, 10%, 15%, 20%, 25%, 30%, 35%, 40%, 45%, 50%, 55%, 60%, 65%, 70%, 75%, 80%, 85%, or 90%, or by a range defined by any of the two aforementioned percentages.

[0022] In some embodiments, the composition comprises an oligonucleotide that targets PLIN1 and when administered to a subject in an effective amount decreases blood pressure in the subject. The blood pressure may be systolic blood pressure. The blood pressure may be diastolic blood pressure. In some embodiments, the blood pressure is decreased by about 2.5% or more, about 5% or more, or about 7.5% or more, as compared to prior to administration. In some embodiments, the blood pressure is decreased by about 10% or more, as compared to prior to administration. In some embodiments, the blood pressure is decreased by about 20% or more, about 30% or more, about 40% or more, about 50% or more, about 60% or more, about 70% or more, about 80% or more, or about 90% or more, as compared to prior to administration. In some embodiments, the blood pressure is decreased by no more than about 2.5%, no more than about 5%, or no more than about 7.5%, as compared to prior to administration. In some embodiments, the blood pressure is decreased by no more than about 10%, as compared to prior to administration. In some embodiments, the blood pressure is decreased by no more than about 20%, no more than about 30%, no more than about 40%, no more than about 50%, no more than about 60%, no more than about 70%, no more than about 80%, or no more than about 90%, as compared to prior to administration. In some embodiments, the blood pressure is decreased by 2.5%, 5%, 7.5%, 10%, 15%, 20%, 25%, 30%, 35%, 40%, 45%, 50%, 55%, 60%, 65%, 70%, 75%, 80%, 85%, or 90%, or by a range defined by any of the two aforementioned percentages.

[0023] In some embodiments, the composition comprises an oligonucleotide that targets PLIN1 and when administered to a subject in an effective amount decreases circulating alanine aminotransferase (ALT) in the subject. In some embodiments, the circulating ALT is decreased by about 2.5% or more, about 5% or more, or about 7.5% or more, as compared to prior to administration. In some embodiments, the circulating ALT is decreased by about 10% or more, as compared to prior to administration. In some embodiments, the circulating ALT is decreased by about 20% or more, about 30% or more, about 40% or more, about 50% or more, about 60% or more, about 70% or more, about 80% or more, or about 90% or more, as compared to prior to administration. In some embodiments, the circulating ALT is decreased by no more than about 2.5%, no more than about 5%, or no more than about 7.5%, as compared to prior to administration. In some embodiments, the circulating ALT is decreased by no more than about 10%, as compared to prior to administration. In some embodiments, the circulating ALT is decreased by no more than about 20%, no more than about 30%, no more than about 40%, no more than about 50%, no more than about 60%, no more than about 70%, no more than about 80%, or no more than about 90%, as compared to prior to administration. In some embodiments, the circulating ALT is decreased by 2.5%, 5%, 7.5%, 10%, 15%, 20%, 25%, 30%, 35%, 40%, 45%, 50%, 55%, 60%, 65%, 70%, 75%, 80%, 85%, or 90%, or by a range defined by any of the two aforementioned percentages.

[0024] In some embodiments, the composition comprises an oligonucleotide that targets PLIN1 and when administered to a subject in an effective amount decreases circulating aspartate aminotransferase (AST) in the subject. In some embodiments, the circulating AST is decreased by about 2.5% or more, about 5% or more, or about 7.5% or more, as compared to prior to administration. In some embodiments, the circulating AST is decreased by about 10% or more, as compared to prior to administration. In some embodiments, the circulating AST is decreased by about 20% or more, about 30% or more, about 40% or more, about 50% or more, about 60% or more, about 70% or more, about 80% or more, or about 90% or more, as compared to prior to administration. In some embodiments, the circulating AST is decreased by no more than about 2.5%, no more than about 5%, or no more than about 7.5%, as compared to prior to administration. In some embodiments, the circulating AST is decreased by no more than about 10%, as compared to prior to administration. In some embodiments, the circulating AST is decreased by no more than about 20%, no more than about 30%, no more than about 40%, no more than about 50%, no more than about 60%, no more than about 70%, no more than about 80%, or no more than about 90%, as compared to prior to administration. In some embodiments, the circulating AST is decreased by 2.5%, 5%, 7.5%, 10%, 15%, 20%, 25%, 30%, 35%, 40%, 45%, 50%, 55%, 60%, 65%, 70%, 75%, 80%, 85%, or 90%, or by a range defined by any of the two aforementioned percentages.

[0025] In some embodiments, the composition comprises an oligonucleotide that targets PLIN1 and when administered to a subject in an effective amount decreases circulating alkaline phosphatase (ALP) in the subject. In some embodiments, the circulating ALP is decreased by about 2.5% or more, about 5% or more, or about 7.5% or more, as compared to prior to administration. In some embodiments, the circulating ALP is decreased by about 10% or more, as compared to prior to administration. In some embodiments, the circulating ALP is decreased by about 20% or more, about 30% or more, about 40% or more, about 50% or more, about 60% or more, about 70% or more, about 80% or more, or about 90% or more, as compared to prior to administration. In some embodiments, the circulating ALP is decreased by no more than about 2.5%, no more than about 5%, or no more than about 7.5%, as compared to prior to administration. In some embodiments, the circulating ALP is decreased by no more than about 10%, as compared to prior to administration. In some embodiments, the circulating ALP is decreased by no more than about 20%, no more than about 30%, no more than about 40%, no more than about 50%, no more than about 60%, no more than about 70%, no more than about 80%, or no more than about 90%, as compared to prior to administration. In some embodiments, the circulating ALP is decreased by 2.5%, 5%, 7.5%, 10%, 15%, 20%, 25%, 30%, 35%, 40%, 45%, 50%, 55%, 60%, 65%, 70%, 75%, 80%, 85%, or 90%, or by a range defined by any of the two aforementioned percentages.

[0026] In some embodiments, the composition comprises an oligonucleotide that targets PLIN1 and when administered to a subject in an effective amount decreases circulating gamma-glutamyl transferase (GGT) in the subject. In some embodiments, the circulating GGT is decreased by about 2.5% or more, about 5% or more, or about 7.5% or more, as compared to prior to administration. In some embodiments, the circulating GGT is decreased by about 10% or more, as compared to prior to administration. In some embodiments, the circulating GGT is decreased by about 20% or more, about 30% or more, about 40% or more, about 50% or more, about 60% or more, about 70% or more, about 80% or more, or about 90% or more, as compared to prior to administration. In some embodiments, the circulating GGT is decreased by no more than about 2.5%, no more than about 5%, or no more than about 7.5%, as compared to prior to administration. In some embodiments, the circulating GGT is decreased by no more than about 10%, as compared to prior to administration. In some embodiments, the circulating GGT is decreased by no more than about 20%, no more than about 30%, no more than about 40%, no more than about 50%, no more than about 60%, no more than about 70%, no more than about 80%, or no more than about 90%, as compared to prior to administration. In some embodiments, the circulating GGT is decreased by 2.5%, 5%, 7.5%, 10%, 15%, 20%, 25%, 30%, 35%, 40%, 45%, 50%, 55%, 60%, 65%, 70%, 75%, 80%, 85%, or 90%, or by a range defined by any of the two aforementioned percentages.

[0027] In some embodiments, the composition comprises an oligonucleotide that targets PLIN1 and when administered to a subject in an effective amount decreases a nonalcoholic fatty liver disease (NAFLD) fibrosis score in the subject. In some embodiments, the NAFLD fibrosis score is decreased by about 2.5% or more, about 5% or more, or about 7.5% or more, as compared to prior to administration. In some embodiments, the NAFLD fibrosis score is decreased by about 10% or more, as compared to prior to administration. In some embodiments, the NAFLD fibrosis score is decreased by about 20% or more, about 30% or more, about 40% or more, about 50% or more, about 60% or more, about 70% or more, about 80% or more, or about 90% or more, as compared to prior to administration. In some embodiments, the NAFLD fibrosis score is decreased by no more than about 2.5%, no more than about 5%, or no more than about 7.5%, as compared to prior to administration. In some embodiments, the NAFLD fibrosis score is decreased by no more than about 10%, as compared to prior to administration. In some embodiments, the NAFLD fibrosis score is decreased by no more than about 20%, no more than about 30%, no more than about 40%, no more than about 50%, no more than about 60%, no more than about 70%, no more than about 80%, or no more than about 90%, as compared to prior to administration. In some embodiments, the NAFLD fibrosis score is decreased by: 2.5%, 5%, 7.5%, 10%, 15%, 20%, 25%, 30%, 35%, 40%, 45%, 50%, 55%, 60%, 65%, 70%, 75%, 80%, 85%, or 90%, or by a range defined by any of the two aforementioned percentages.

[0028] In some embodiments, the composition comprises an oligonucleotide that targets PLIN1 and when administered to a subject in an effective amount decreases a nonalcoholic fatty liver disease (NAFLD) activity score in the subject. In some embodiments, the NAFLD activity score is decreased by about 2.5% or more, about 5% or more, or about 7.5% or more, as compared to prior to administration. In some embodiments, the NAFLD activity score is decreased by about 10% or more, as compared to prior to administration. In some embodiments, the NAFLD activity score is decreased by about 20% or more, about 30% or more, about 40% or more, about 50% or more, about 60% or more, about 70% or more, about 80% or more, or about 90% or more, as compared to prior to administration. In some embodiments, the NAFLD activity score is decreased by no more than about 2.5%, no more than about 5%, or no more than about 7.5%, as compared to prior to administration. In some embodiments, the NAFLD activity score is decreased by no more than about 10%, as compared to prior to administration. In some embodiments, the NAFLD activity score is decreased by no more than about 20%, no more than about 30%, no more than about 40%, no more than about 50%, no more than about 60%, no more than about 70%, no more than about 80%, or no more than about 90%, as compared to prior to administration. In some embodiments, the NAFLD activity score is decreased by 2.5%, 5%, 7.5%, 10%, 15%, 20%, 25%, 30%, 35%, 40%, 45%, 50%, 55%, 60%, 65%, 70%, 75%, 80%, 85%, or 90%, or by a range defined by any of the two aforementioned percentages.

[0029] In some embodiments, the composition comprises an oligonucleotide that targets PLIN1 and when administered to a subject in an effective amount decreases a liver fat percentage in the subject. In some embodiments, the liver fat percentage is decreased by about 2.5% or more, about 5% or more, or about 7.5% or more, as compared to prior to administration. In some embodiments, the liver fat percentage is decreased by about 10% or more, as compared to prior to administration. In some embodiments, the liver fat percentage is decreased by about 20% or more about 30% or more, about 40% or more, about 50% or more, about 60% or more, about 70% or more, about 80% or more, or about 90% or more, as compared to prior to administration. In some embodiments, the liver fat percentage is decreased by no more than about 2.5%, no more than about 5%, or no more than about 7.5%, as compared to prior to administration. In some embodiments, the liver fat percentage is decreased by no more than about 10%, as compared to prior to administration. In some embodiments, the liver fat percentage is decreased by no more than about 20%, no more than about 30%, no more than about 40%, no more than about 50%, no more than about 60%, no more than about 70%, no more than about 80%, or no more than about 90%, as compared to prior to administration. In some embodiments, the liver fat percentage is decreased by 2.5%, 5%, 7.5%, 10%, 15%, 20%, 25%, 30%, 35%, 40%, 45%, 50%, 55%, 60%, 65%, 70%, 75%, 80%, 85%, or 90%, or by a range defined by any of the two aforementioned percentages.

[0030] In some embodiments, the composition comprises an oligonucleotide that targets PLIN1 and when administered to a subject in an effective amount decreases a liver fibrosis score in the subject. In some embodiments, the liver fibrosis score is decreased by about 2.5% or more, about 5% or more, or about 7.5% or more, as compared to prior to administration. In some embodiments, the liver fibrosis score is decreased by about 10% or more, as compared to prior to administration. In some embodiments, the liver fibrosis score is decreased by about 20% or more, about 30% or more about 40% or more, about 50% or more, about 60% or more, about 70% or more, about 80% or more, or about 90% or more, as compared to prior to administration. In some embodiments, the liver fibrosis score is decreased by no more than about 2.5%, no more than about 5%, or no more than about 7.5%, as compared to prior to administration. In some embodiments, the liver fibrosis score is decreased by no more than about 10%, as compared to prior to administration. In some embodiments, the liver fibrosis score is decreased by no more than about 20%, no more than about 30%, no more than about 40%, no more than about 50%, no more than about 60%, no more than about 70%, no more than about 80%, or no more than about 90%, as compared to prior to administration. In some embodiments, the liver fibrosis score is decreased by 2.5%, 5%, 7.5%, 10%, 15%, 20%, 25%, 30%, 35%, 40%, 45%, 50%, 55%, 60%, 65%, 70%, 75%, 80%, 85%, or 90%, or by a range defined by any of the two aforementioned percentages.

[0031] In some embodiments, the composition comprises an oligonucleotide that targets PLIN1 and when administered to a subject in an effective amount increases circulating high density lipoprotein (HDL) in the subject. In some embodiments, the circulating HDL is increased by about 2.5% or more, about 5% or more, or about 7.5% or more, as compared to prior to administration. In some embodiments, the circulating HDL is increased by about 10% or more, as compared to prior to administration. In some embodiments, the circulating HDL is increased by about 20% or more, about 30% or more, about 40% or more, about 50% or more, about 60% or more, about 70% or more, about 80% or more, about 90% or more, or about 100% or more, as compared to prior to administration. In some embodiments, the circulating HDL is increased by about 200% or more, about 300% or more, about 400% or more, about 500% or more, about 600% or more, about 700% or more, about 800% or more, about 900% or more, or about 1000% or more, as compared to prior to administration. In some embodiments, the circulating HDL is increased by no more than about 2.5%, no more than about 5%, or no more than about 7.5%, as compared to prior to administration. In some embodiments, the circulating HDL is increased by no more than about 10%, as compared to prior to administration. In some embodiments, the circulating HDL is increased by no more than about 20%, no more than about 30%, no more than about 40%, no more than about 50%, no more than about 60%, no more than about 70%, no more than about 80%, no more than about 90%, or no more than about 100%, as compared to prior to administration. In some embodiments, the circulating HDL is increased by no more than about 200%, no more than about 300%, no more than about 400%, no more than about 500%, no more than about 600%, no more than about 700%, no more than about 800%, no more than about 900%, or no more than about 1000%, as compared to prior to administration. In some embodiments, the circulating HDL is increased by 2.5%, 5%, 7.5%, 10%, 15%, 20%, 25%, 30%, 35%, 40%, 45%, 50%, 55%, 60%, 65%, 70%, 75%, 80%, 85%, 90%, 95%, 100%, 150%, 200%, 250%, 300%, 400%, 500%, 600%, 700%, 800%, 900%, or 1000%, or by a range defined by any of the two aforementioned percentages.

[0032] In some embodiments, the composition comprises an oligonucleotide that targets PLIN1 and when administered to a subject in an effective amount increases circulating apolipoprotein A1 (ApoA1) in the subject. In some embodiments, the circulating ApoA1 is increased by about 2.5% or more, about 5% or more, or about 7.5% or more, as compared to prior to administration. In some embodiments, the circulating ApoA1 is increased by about 10% or more, as compared to prior to administration. In some embodiments, the circulating ApoA1 is increased by about 20% or more, about 30% or more, about 40% or more, about 50% or more, about 60% or more, about 70% or more, about 80% or more, about 90% or more, or about 100% or more, as compared to prior to administration. In some embodiments, the circulating ApoA1 is increased by about 200% or more, about 300% or more, about 400% or more, about 500% or more, about 600% or more, about 700% or more, about 800% or more, about 900% or more, or about 1000% or more, as compared to prior to administration. In some embodiments, the circulating ApoA1 is increased by no more than about 2.5%, no more than about 5%, or no more than about 7.5%, as compared to prior to administration. In some embodiments, the circulating ApoA1 is increased by no more than about 10%, as compared to prior to administration. In some embodiments, the circulating ApoA1 is increased by no more than about 20%, no more than about 30%, no more than about 40%, no more than about 50%, no more than about 60%, no more than about 70%, no more than about 80%, no more than about 90%, or no more than about 100%, as compared to prior to administration. In some embodiments, the circulating ApoA1 is increased by no more than about 200%, no more than about 300%, no more than about 400%, no more than about 500%, no more than about 600%, no more than about 700%, no more than about 800%, no more than about 900%, or no more than about 1000%, as compared to prior to administration. In some embodiments, the circulating ApoA1 is increased by 2.5%, 5%, 7.5%, 10%, 15%, 20%, 25%, 30%, 35%, 40%, 45%, 50%, 55%, 60%, 65%, 70%, 75%, 80%, 85%, 90%, 95%, 100%, 150%, 200%, 250%, 300%, 400%, 500%, 600%, 700%, 800%, 900%, or 1000%, or by a range defined by any of the two aforementioned percentages.

[0033] In some embodiments, the composition comprises an oligonucleotide that targets PLIN1 and when administered to a subject in an effective amount increases insulin sensitivity in the subject. In some embodiments, the insulin sensitivity is increased by about 2.5% or more, about 5% or more, or about 7.5% or more, as compared to prior to administration. In some embodiments, the insulin sensitivity is increased by about 10% or more, as compared to prior to administration. In some embodiments, the insulin sensitivity is increased by about 20% or more, about 30% or more, about 40% or more, about 50% or more, about 60% or more, about 70% or more, about 80% or more, about 90% or more, or about 100% or more, as compared to prior to administration. In some embodiments, the insulin sensitivity is increased by about 200% or more, about 300% or more, about 400% or more, about 500% or more, about 600% or more, about 700% or more, about 800% or more, about 900% or more, or about 1000% or more, as compared to prior to administration. In some embodiments, the insulin sensitivity is increased by no more than about 2.5%, no more than about 5%, or no more than about 7.5%, as compared to prior to administration. In some embodiments, the insulin sensitivity is increased by no more than about 10%, as compared to prior to administration. In some embodiments, the insulin sensitivity is increased by no more than about 20%, no more than about 30%, no more than about 40%, no more than about 50%, no more than about 60%, no more than about 70%, no more than about 80%, no more than about 90%, or no more than about 100%, as compared to prior to administration. In some embodiments, the insulin sensitivity is increased by no more than about 200%, no more than about 300%, no more than about 400%, no more than about 500%, no more than about 600%, no more than about 700%, no more than about 800%, no more than about 900%, or no more than about 1000%, as compared to prior to administration. In some embodiments, the insulin sensitivity is increased by 2.5%, 5%, 7.5%, 10%, 15%, 20%, 25%, 30%, 35%, 40%, 45%, 50%, 55%, 60%, 65%, 70%, 75%, 80%, 85%, 90%, 95%, 100%, 150%, 200%, 250%, 300%, 400%, 500%, 600%, 700%, 800%, 900%, or 1000%, or by a range defined by any of the two aforementioned percentages.

[0034] In some embodiments, the composition comprises an oligonucleotide that targets PLIN1 and when administered to a subject in an effective amount increases left ventricular ejection fraction in the subject. In some embodiments, the left ventricular ejection fraction is increased by about 2.5% or more, about 5% or more, or about 7.5% or more, as compared to prior to administration. In some embodiments, the left ventricular ejection fraction is increased by about 10% or more, as compared to prior to administration. In some embodiments, the left ventricular ejection fraction is increased by about 20% or more, about 30% or more, about 40% or more, about 50% or more, about 60% or more, about 70% or more, about 80% or more, about 90% or more, or about 100% or more, as compared to prior to administration. In some embodiments, the left ventricular ejection fraction is increased by about 200% or more, about 300% or more, about 400% or more, about 500% or more, about 600% or more, about 700% or more, about 800% or more, about 900% or more, or about 1000% or more, as compared to prior to administration. In some embodiments, the left ventricular ejection fraction is increased by no more than about 2.5%, no more than about 5%, or no more than about 7.5%, as compared to prior to administration. In some embodiments, the left ventricular ejection fraction is increased by no more than about 10%, as compared to prior to administration. In some embodiments, the left ventricular ejection fraction is increased by no more than about 20%, no more than about 30%, no more than about 40%, no more than about 50%, no more than about 60%, no more than about 70%, no more than about 80%, no more than about 90%, or no more than about 100%, as compared to prior to administration. In some embodiments, the left ventricular ejection fraction is increased by no more than about 200%, no more than about 300%, no more than about 400%, no more than about 500%, no more than about 600%, no more than about 700%, no more than about 800%, no more than about 900%, or no more than about 1000%, as compared to prior to administration. In some embodiments, the left ventricular ejection fraction is increased by 2.5%, 5%, 7.5%, 10%, 15%, 20%, 25%, 30%, 35%, 40%, 45%, 50%, 55%, 60%, 65%, 70%, 75%, 80%, 85%, 90%, 95%, 100%, 150%, 200%, 250%, 300%, 400%, 500%, 600%, 700%, 800%, 900%, or 1000%, or by a range defined by any of the two aforementioned percentages.

### A. SiRNAs

[0035] In some embodiments, the composition comprises an oligonucleotide that targets PLIN1, wherein the oligonucleotide comprises a small interfering RNA (siRNA). In some embodiments, the composition comprises an oligonucleotide that targets PLIN1, wherein the oligonucleotide comprises a small interfering RNA (siRNA) comprising a sense strand and an antisense strand.

[0036] In some embodiments, the composition comprises an oligonucleotide that inhibits the expression of PLIN1, wherein the oligonucleotide comprises an siRNA comprising a sense strand and an antisense strand, wherein the sense strand is 12-30 nucleosides in length. In some embodiments, the composition comprises a sense strand that is 10, 11, 12, 13, 14, 15, 16, 17, 18, 19, 20, 21, 22, 23, 24, 25, 26, 27, 28, 29, or 30 nucleosides in length, or a range defined by any of the two aforementioned numbers. The sense strand may be 14-30 nucleosides in length. In some embodiments, the composition comprises an antisense strand is 12-30 nucleosides in length. In some embodiments, the composition comprises an antisense strand that is 10, 11, 12, 13, 14, 15, 16, 17, 18, 19, 20, 21, 22, 23, 24, 25, 26, 27, 28, 29, or 30 nucleosides in length, or a range defined by any of the two aforementioned numbers. The antisense strand may be 14-30 nucleosides in length.

[0037] In some embodiments, the composition comprises an oligonucleotide that inhibits the expression of PLIN1, wherein the oligonucleotide comprises an siRNA comprising a sense strand and an antisense strand, each strand is independently about 12-30 nucleosides in length, and at least one of the sense strand and the antisense strand comprises a nucleoside sequence comprising about 12-30 contiguous nucleosides of a full-length human PLIN1 mRNA sequence such as SEQ ID NO: 6014. In some embodiments, at least one of the sense strand and the antisense strand comprise a nucleoside sequence comprising at least about 10, 11, 12, 13, 14, 15, 16, 17, 18, 19, 20, 21, 22, 23, 24, 25, 26, 27, 28, 29, 30, or more contiguous nucleosides of one of SEQ ID NO: 6014.

[0038] In some embodiments, the composition comprises an oligonucleotide that inhibits the expression of PLIN1, wherein the oligonucleotide comprises an siRNA comprising a sense strand and an antisense strand, wherein the sense strand and the antisense strand form a double-stranded RNA duplex. In some embodiments, the first base pair of the double-stranded RNA duplex is an AU base pair.

[0039] In some embodiments, the sense strand further comprises a 3′ overhang. In some embodiments, the 3′ overhang comprises 1, 2, 3, 4, 5, 6, 7, 8, 9, or 10 nucleosides, or a range of nucleotides defined by any two of the aforementioned numbers. In some embodiments, the 3′ overhang comprises 1, 2, or more nucleosides. In some embodiments, the 3′ overhang comprises 2 nucleosides. In some embodiments, the sense strand further comprises a 5′ overhang. In some embodiments, the 5′ overhang comprises 1, 2, 3, 4, 5, 6, 7, 8, 9, or 10 nucleosides, or a range of nucleotides defined by any two of the aforementioned numbers. In some embodiments, the 5′ overhang comprises 1, 2, or more nucleosides. In some embodiments, the 5′ overhang comprises 2 nucleosides.

[0040] In some embodiments, the antisense strand further comprises a 3′ overhang. In some embodiments, the 3′ overhang comprises 1, 2, 3, 4, 5, 6, 7, 8, 9, or 10 nucleosides, or a range of nucleotides defined by any two of the aforementioned numbers. In some embodiments, the 3″ overhang comprises 1, 2, or more nucleosides. In some embodiments, the 3′ overhang comprises 2 nucleosides. In some embodiments, the antisense strand further comprises a 5′ overhang. In some embodiments, the 5′ overhang comprises 1, 2, 3, 4, 5, 6, 7, 8, 9, or 10 nucleosides, or a range of nucleotides defined by any two of the aforementioned numbers. In some embodiments, the 5′ overhang comprises 1, 2, or more nucleosides. In some embodiments, the 5′ overhang comprises 2 nucleosides.

[0041] In some embodiments, the composition comprises an oligonucleotide that inhibits the expression of PLIN1, wherein the oligonucleotide comprises an siRNA comprising a sense strand and an antisense strand, wherein the siRNA binds with a 19mer in a human PLIN1 mRNA. In some embodiments, the siRNA binds with a 12mer, a 13mer, a 14mer, a 15mer, a 16mer, a 17mer, a 18mer, a 19mer, a 20mer, a 21 mer, a 22mer, a 23mer, a 24mer, or a 25mer in a human PLIN1 mRNA.

[0042] In some embodiments, the composition comprises an oligonucleotide that inhibits the expression of PLIN1, wherein the oligonucleotide comprises an siRNA comprising a sense strand and an antisense strand, wherein the siRNA binds with a 17mer in a non-human primate PLIN1 mRNA. In some embodiments, the siRNA binds with a 12mer, a 13mer, a 14mer, a 15mer, a 16mer, a 17mer, a 18mer, a 19mer, a 20mer, a 21mer, a 22mer, a 23mer, a 24mer, or a 25mer in a non-human primate PLIN1 mRNA.

[0043] In some embodiments, the composition comprises an oligonucleotide that inhibits the expression of PLIN1, wherein the oligonucleotide comprises an siRNA comprising a sense strand and an antisense strand, wherein the siRNA binds with a human PLIN1 mRNA and less than or equal to 20 human off-targets, with no more than 2 mismatches in the antisense strand. In some embodiments, the siRNA binds with a human PLIN1 mRNA and less than or equal to 10 human off-targets, with no more than 2 mismatches in the antisense strand. In some embodiments, the siRNA binds with a human PLIN1 mRNA and less than or equal to 30 human off-targets, with no more than 2 mismatches in the antisense strand. In some embodiments, the siRNA binds with a human PLIN1 mRNA and less than or equal to 40 human off-targets, with no more than 2 mismatches in the antisense strand. In some embodiments, the siRNA binds with a human PLIN1 mRNA and less than or equal to 50 human off-targets, with no more than 2 mismatches in the antisense strand. In some embodiments, the siRNA binds with a human PLIN1 mRNA and less than or equal to 10 human off-targets, with no more than 3 mismatches in the antisense strand. In some embodiments, the siRNA binds with a human PLIN1 mRNA and less than or equal to 20 human off-targets, with no more than 3 mismatches in the antisense strand. In some embodiments, the siRNA binds with a human PLIN1 mRNA and less than or equal to 30 human off-targets, with no more than 3 mismatches in the antisense strand. In some embodiments, the siRNA binds with a human PLIN1 mRNA and less than or equal to 40 human off-targets, with no more than 3 mismatches in the antisense strand. In some embodiments, the siRNA binds with a human PLIN1 mRNA and less than or equal to 50 human off-targets, with no more than 3 mismatches in the antisense strand.

[0044] In some embodiments, the composition comprises an oligonucleotide that inhibits the expression of PLIN1, wherein the oligonucleotide comprises an siRNA comprising a sense strand and an antisense strand, siRNA binds with a human PLIN1 mRNA target site that does not harbor an SNP, with a minor allele frequency (MAF) greater or equal to 1% (pos, 2-18). In some embodiments, the MAF is greater or equal to about 2%, about 3%, about 4%, about 5%, about 6%, about 7%, about 8%, about 9%, about 10%, about 11%, about 12%, about 13%, about 14%, about 15%, about 16%, about 17%, about 18%, about 19%, or about 20%.

[0045] In some embodiments, the composition comprises an oligonucleotide that inhibits the expression of PLIN1, wherein the oligonucleotide comprises an siRNA comprising a sense strand and an antisense strand, wherein the sense strand comprises a nucleoside sequence comprising or consisting of the sequence of any one of SEQ ID NOs: 1-2898, or a nucleic acid sequence thereof having 1 or 2 nucleoside substitutions, additions, or deletions. In some embodiments, the sense strand comprises a nucleoside sequence comprising or consisting of the sequence of any one of SEQ ID NOs: 1-2898, or a nucleic acid sequence thereof having 3 or 4 nucleoside substitutions, additions, or deletions. In some embodiments, the sense strand further comprises a 3′ overhang. In some embodiments, the 3′ overhang comprises 1, 2, 3, 4, 5, 6, 7, 8, 9, or 10 nucleosides, or a range of nucleotides defined by any two of the aforementioned numbers. In some embodiments, the 3′ overhang comprises 1, 2, or more nucleosides. In some embodiments, the 3′ overhang comprises 2 nucleosides. In some embodiments, the sense strand further comprises a 5′ overhang. In some embodiments, the 5′ overhang comprises 1, 2, 3, 4, 5, 6, 7, 8, 9, or 10 nucleosides, or a range of nucleotides defined by any two of the aforementioned numbers. In some embodiments, the 5′ overhang comprises 1, 2, or more nucleosides. In some embodiments, the 5′ overhang comprises 2 nucleosides. In some embodiments, the sense strand comprises a nucleoside sequence comprising or consisting of the sequence of any one of SEQ ID NOs: 1-2898, or a nucleic acid sequence thereof having 1 or 2 nucleoside additions at the 3′ end. In some embodiments, the composition comprises an oligonucleotide that inhibits the expression of PLIN1, wherein the oligonucleotide comprises an siRNA comprising a sense strand and an antisense strand, wherein the sense strand comprises a nucleoside sequence comprising or consisting of the sequence of any one of SEQ ID NOs: 1-2898. In some embodiments, the composition comprises an oligonucleotide that inhibits the expression of PLIN1, wherein the oligonucleotide comprises an siRNA comprising a sense strand and an antisense strand, wherein the antisense strand comprises a nucleoside sequence comprising or consisting of the sequence of any one of SEQ ID NOs: 2899-5796, or a nucleic acid sequence thereof having 1 or 2 nucleoside substitutions, additions, or deletions. In some embodiments, the antisense strand sequence comprises a nucleoside sequence comprising or consisting of the sequence of any one of SEQ ID NOs: 2899-5796, or a nucleic acid sequence thereof having 3 or 4 nucleoside substitutions, additions, or deletions. In some embodiments, the antisense strand further comprises a 3′ overhang. In some embodiments, the 3′ overhang comprises 1, 2, 3, 4, 5, 6, 7, 8, 9, or 10 nucleosides, or a range of nucleotides defined by any two of the aforementioned numbers. In some embodiments, the 3″ overhang comprises 1, 2, or more nucleosides. In some embodiments, the 3′ overhang comprises 2 nucleosides. In some embodiments, the antisense strand further comprises a 5′ overhang. In some embodiments, the 5′ overhang comprises 1, 2, 3, 4, 5, 6, 7, 8, 9, or 10 nucleosides, or a range of nucleotides defined by any two of the aforementioned numbers. In some embodiments, the 5′ overhang comprises 1, 2, or more nucleosides. In some embodiments, the 5′ overhang comprises 2 nucleosides. In some embodiments, the antisense strand comprises a nucleoside sequence comprising or consisting of the sequence of any one of SEQ ID NOs: 2899-5796, or a nucleic acid sequence thereof having 1 or 2 nucleoside additions at the 3′ end. In some embodiments, the composition comprises an oligonucleotide that inhibits the expression of PLIN1, wherein the oligonucleotide comprises an siRNA comprising a sense strand and an antisense strand, wherein the antisense strand comprises a nucleoside sequence comprising or consisting of the sequence of any one of SEQ ID NOs: 2899-5796.

[0046] In some embodiments, the siRNA comprises a sense strand having a sequence in accordance with any of SEQ ID NOs: 1-2898. In some embodiments, the sense strand sequence comprises or consists of sequence at least 75% identical to any one of SEQ ID NOs: 1-2898, at least 80% identical to any one of SEQ ID NOs: 1-2898, at least 85% identical to of any one of SEQ ID NOs: 1-2898, at least 90% identical to any one of SEQ ID NOs: 1-2898, or at least 95% identical to any one of SEQ ID NOs: 1-2898. In some embodiments, the sense strand sequence comprises or consists of the sequence of any one of SEQ ID NOs: 1-2898, or a sense strand sequence thereof having 1, 2, 3, or 4 nucleoside substitutions, additions, or deletions. In some embodiments, the sense strand sequence comprises or consists of the sequence of any one of SEQ ID NOs: 1-2898, or a sense strand sequence thereof having 1 or 2 nucleoside substitutions, additions, or deletions. In some embodiments, the sense strand sequence comprises or consists of a sequence 100% identical to SEQ ID NOs: 1-2898. The sense strand sequence may include the first 5, 6, 7, 8, 9, 10, 11, 12, 13, 14, 15, 16, 17, 18, or 19 nucleotides (in the 5′ to 3′ direction) of any of the aforementioned sequences. The sense strand sequence may include the last 5, 6, 7, 8, 9, 10, 11, 12, 13, 14, 15, 16, 17, 18, or 19 nucleotides (in the 5′ to 3′ direction) of any of the aforementioned sequences. The sense strand may comprise a modification pattern described herein. The sense strand may comprise an overhang. The sense strand may comprise a lipid moiety. The sense strand may comprise a GalNAc moiety. In some embodiments, the siRNA comprises an antisense strand having a sequence in accordance with any of SEQ ID NOs: 2899-5796. In some embodiments, the antisense strand sequence comprises or consists of sequence at least 75% identical to any one of SEQ ID NOs: 2899-5796, at least 80% identical to any one of SEQ ID NOs: 2899-5796, at least 85% identical to of any one of SEQ ID NOs: 5491-10980, at least 90% identical to any one of SEQ ID NOs: 2899-5796, or at least 95% identical to any one of SEQ ID NOs: 2899-5796. In some embodiments, the antisense strand sequence comprises or consists of the sequence of any one of SEQ ID NOs: 2899-5796, or an antisense strand sequence thereof having 1, 2, 3, or 4 nucleoside substitutions, additions, or deletions. In some embodiments, the antisense strand sequence comprises or consists of the sequence of any one of SEQ ID NOs: 2899-5796, or an antisense strand sequence thereof having 1 or 2 nucleoside substitutions, additions, or deletions. In some embodiments, the antisense strand sequence comprises or consists of a sequence 100% identical to SEQ ID NOs: 2899-5796. The antisense strand sequence may include the first 5, 6, 7, 8, 9, 10, 11, 12, 13, 14, 15, 16, 17, 18, or 19 nucleotides (in the 5′ to 3′ direction) of any of the aforementioned sequences. The antisense strand sequence may include the last 5, 6, 7, 8, 9, 10, 11, 12, 13, 14, 15, 16, 17, 18, or 19 nucleotides (in the 5′ to 3′ direction) of any of the aforementioned sequences. The antisense strand may comprise an overhang. The antisense strand may comprise a modification pattern described herein. The antisense strand may comprise a lipid moiety or a GalNAc moiety.

[0047] In some embodiments, the siRNA comprises a sense strand or antisense strand having a sequence in accordance with the sense strand or antisense strand sequence of an siRNA of subset A. In some embodiments, the sense strand or antisense strand comprises a sequence at least 75% identical, at least 80% identical, at least 85% identical, at least 90% identical, or at least 95% identical, to a sense strand or antisense strand sequence of subset A. In some embodiments, the sense strand or antisense strand comprises a sequence of a sense or antisense strand of subset A, or a sequence thereof having 3 or 4 nucleoside substitutions, additions, or deletions. In some embodiments, the sense strand or antisense strand comprises a sequence of a sense or antisense strand of subset A, or a sequence thereof having 1 or 2 nucleoside substitutions, additions, or deletions. In some embodiments, the sense strand or antisense sequence comprises or consists of a sequence 100% identical to a sense strand or antisense strand sequence of subset A. In some embodiments, the siRNA is cross-reactive with a non-human primate (NHP) PLIN1 mRNA. The siRNA may include one or more internucleoside linkages and/or one or more nucleoside modifications. The sense strand or antisense strand may comprise any modifications described herein. The sense strand or antisense strand may comprise a lipid moiety or a GalNAc moiety. Subset A contains 145 siRNAs whose base sequences are shown in Table 4.

[0048] In some embodiments, the siRNA comprises a sense strand or antisense strand having a sequence in accordance with the sense strand or antisense strand sequence of an siRNA of subset B. In some embodiments, the sense strand or antisense strand comprises a sequence at least 75% identical, at least 80% identical, at least 85% identical, at least 90% identical, or at least 95% identical, to a sense strand or antisense strand sequence of subset B. In some embodiments, the sense strand or antisense strand comprises a sequence of a sense or antisense strand of subset B, or a sequence thereof having 3 or 4 nucleoside substitutions, additions, or deletions. In some embodiments, the sense strand or antisense strand comprises a sequence of a sense or antisense strand of subset B, or a sequence thereof having 1 or 2 nucleoside substitutions, additions, or deletions. In some embodiments, the sense strand or antisense sequence comprises or consists of a sequence 100% identical to a sense strand or antisense strand sequence of subset B. The sense strand or antisense strand may comprise any modifications described herein. The sense strand or antisense strand may comprise a lipid moiety or a GalNAc moiety. Subset B includes 119 siRNAs whose base sequences are shown in Table 5.

[0049] In some embodiments, the siRNA comprises a sense strand or antisense strand having a sequence in accordance with the sense strand or antisense strand sequence of an siRNA of subset C. In some embodiments, the sense strand or antisense strand comprises a sequence at least 75% identical, at least 80% identical, at least 85% identical, at least 90% identical, or at least 95% identical, to a sense strand or antisense strand sequence of subset C. In some embodiments, the sense strand or antisense strand comprises a sequence of a sense or antisense strand of subset C, or a sequence thereof having 3 or 4 nucleoside substitutions, additions, or deletions. In some embodiments, the sense strand or antisense strand comprises a sequence of a sense or antisense strand of subset C, or a sequence thereof having 1 or 2 nucleoside substitutions, additions, or deletions. In some embodiments, the sense strand or antisense sequence comprises or consists of a sequence 100% identical to a sense strand or antisense strand sequence of subset C. The sense strand or antisense strand may comprise any modifications described herein. The sense strand or antisense strand may comprise a lipid moiety or a GalNAc moiety. Subset C includes 77 siRNAs whose base sequences are shown in Table 6.

[0050] In some embodiments, the siRNA comprises a sense strand or antisense strand having a sequence in accordance with the sense strand or antisense strand sequence of an siRNA of subset D. In some embodiments, the sense strand or antisense strand comprises a sequence at least 75% identical, at least 80% identical, at least 85% identical, at least 90% identical, or at least 95% identical, to a sense strand or antisense strand sequence of subset D. In some embodiments, the sense strand or antisense strand comprises a sequence of a sense or antisense strand of subset D, or a sequence thereof having 3 or 4 nucleoside substitutions, additions, or deletions. In some embodiments, the sense strand or antisense strand comprises a sequence of a sense or antisense strand of subset D, or a sequence thereof having 1 or 2 nucleoside substitutions, additions, or deletions. In some embodiments, the sense strand or antisense sequence comprises or consists of a sequence 100% identical to a sense strand or antisense strand sequence of subset D. The sense strand or antisense strand may comprise any modifications described herein. The sense strand or antisense strand may comprise a lipid moiety or a GalNAc moiety. Subset D includes 62 siRNAs whose base sequences are shown in Table 7.

[0051] In some embodiments, the siRNA comprises a sense strand or antisense strand having a sequence in accordance with the sense strand or antisense strand sequence of an siRNA of subset E. In some embodiments, the sense strand or antisense strand comprises a sequence at least 75% identical, at least 80% identical, at least 85% identical, at least 90% identical, or at least 95% identical, to a sense strand or antisense strand sequence of subset E. In some embodiments, the sense strand or antisense strand comprises a sequence of a sense or antisense strand of subset E, or a sequence thereof having 3 or 4 nucleoside substitutions, additions, or deletions. In some embodiments, the sense strand or antisense strand comprises a sequence of a sense or antisense strand of subset E, or a sequence thereof having 1 or 2 nucleoside substitutions, additions, or deletions. In some embodiments, the sense strand or antisense sequence comprises or consists of a sequence 100% identical to a sense strand or antisense strand sequence of subset E. The sense strand or antisense strand may comprise any modifications described herein. The sense strand or antisense strand may comprise a lipid moiety or a GalNAc moiety. Subset E includes 51 siRNAs whose base sequences are shown in Table 8.

[0052] In some embodiments, the siRNA comprises a sense strand or antisense strand having a sequence in accordance with the sense strand or antisense strand sequence of an siRNA of subset F. In some embodiments, the sense strand or antisense strand comprises a sequence at least 75% identical, at least 80% identical, at least 85% identical, at least 90% identical, or at least 95% identical, to a sense strand or antisense strand sequence of subset F. In some embodiments, the sense strand or antisense strand comprises a sequence of a sense or antisense strand of subset F, or a sequence thereof having 3 or 4 nucleoside substitutions, additions, or deletions. In some embodiments, the sense strand or antisense strand comprises a sequence of a sense or antisense strand of subset F, or a sequence thereof having 1 or 2 nucleoside substitutions, additions, or deletions. In some embodiments, the sense strand or antisense sequence comprises or consists of a sequence 100% identical to a sense strand or antisense strand sequence of subset F. The sense strand or antisense strand may comprise any modifications described herein. The sense strand or antisense strand may comprise a lipid moiety or a GalNAc moiety. Subset F includes 49 siRNAs. The siRNAs in subset F include siRNAs from subset A, and are included in Table 9.

[0053] In some embodiments, the siRNA comprises the sense strand and/or the antisense strand sequence of an siRNA in any one of Tables 4-9, or a nucleic acid sequence thereof having 3 or 4 nucleoside substitutions, additions, or deletions. In some embodiments, the siRNA comprises the sense strand and/or the antisense strand sequence of an siRNA in any one of Tables 4-9, or a nucleic acid sequence thereof having 1 or 2 nucleoside substitutions, additions, or deletions. In some embodiments, the siRNA comprises the sense strand and/or the antisense strand sequence of an siRNA in any one of Tables 4-9. In some embodiments, the siRNA is cross-reactive with a non-human primate (NHP) PLIN1 mRNA. The siRNA may include one or more internucleoside linkages and/or one or more nucleoside modifications.

[0054] In some embodiments, the siRNA comprises a sense strand or antisense strand having a sequence in accordance with the sense strand or antisense strand sequence of an siRNA in Table 22. In some embodiments, the sense strand or antisense strand comprises a sequence at least 75% identical, at least 80% identical, at least 85% identical, at least 90% identical, or at least 95% identical, to a sense strand or antisense strand sequence in Table 22. In some embodiments, the sense strand or antisense strand comprises a sequence of a sense or antisense strand in Table 22, or a sequence thereof having 3 or 4 nucleoside substitutions, additions, or deletions. In some embodiments, the sense strand or antisense strand comprises a sequence of a sense or antisense strand in Table 22, or a sequence thereof having 1 or 2 nucleoside substitutions, additions, or deletions. In some embodiments, the sense strand or antisense sequence comprises or consists of a sequence 100% identical to a sense strand or antisense strand sequence in Table 22. The sense strand or antisense strand may comprise an overhang. The sense strand or antisense strand may comprise any modifications described herein. The sense strand or antisense strand may comprise a lipid moiety or a GalNAc moiety.

[0055] In some embodiments, the siRNA comprises a sense strand having a sequence in accordance with SEQ ID NO: 5984. In some embodiments, the sense strand sequence comprises or consists of sequence at least 75% identical to SEQ ID NO: 5984, at least 80% identical to SEQ ID NO: 5984, at least 85% identical to SEQ ID NO: 5984, at least 90% identical to SEQ ID NO: 5984, or at least 95% identical to SEQ ID NO: 5984. In some embodiments, the sense strand sequence comprises or consists of the sequence of SEQ ID NO 5984, or a sense strand sequence thereof having 1, 2, 3, or 4 nucleoside substitutions, additions, or deletions. In some embodiments, the sense strand sequence comprises or consists of the sequence of SEQ ID NO: 5984, or a sense strand sequence thereof having 1 or 2 nucleoside substitutions, additions, or deletions. In some embodiments, the sense strand sequence comprises or consists of a sequence 100% identical to SEQ ID NO: 5984. The sense strand may comprise any modifications or modification pattern described herein. The sense strand may comprise a moiety such as a GalNAc moiety or a lipid moiety. In some embodiments, the siRNA comprises an antisense strand having a sequence in accordance with SEQ ID NO: 6008. In some embodiments, the antisense strand sequence comprises or consists of sequence at least 75% identical to SEQ ID NO: 6008, at least 80% identical to SEQ ID NO: 6008, at least 85% identical to SEQ ID NO: 6008, at least 90% identical to SEQ ID NO: 6008, or at least 95% identical to SEQ ID NO: 6008. In some embodiments, the antisense strand sequence comprises or consists of the sequence of SEQ ID NO 6008, or an antisense strand sequence thereof having 1, 2, 3, or 4 nucleoside substitutions, additions, or deletions. In some embodiments, the antisense strand sequence comprises or consists of the sequence of SEQ ID NO: 6008, or an antisense strand sequence thereof having 1 or 2 nucleoside substitutions, additions, or deletions. In some embodiments, the antisense strand sequence comprises or consists of a sequence 100% identical to SEQ ID NO: 6008. The antisense strand may comprise any modifications or modification pattern described herein. The antisense strand may comprise a moiety such as a GalNAc moiety or a lipid moiety.

[0056] In some embodiments, the siRNA comprises a sense strand having a sequence in accordance with SEQ ID NO: 5987. In some embodiments, the sense strand sequence comprises or consists of sequence at least 75% identical to SEQ ID NO: 5987, at least 80% identical to SEQ ID NO: 5987, at least 85% identical to SEQ ID NO: 5987, at least 90% identical to SEQ ID NO: 5987, or at least 95% identical to SEQ ID NO: 5987. In some embodiments, the sense strand sequence comprises or consists of the sequence of SEQ ID NO 5987, or a sense strand sequence thereof having 1, 2, 3, or 4 nucleoside substitutions, additions, or deletions. In some embodiments, the sense strand sequence comprises or consists of the sequence of SEQ ID NO: 5987, or a sense strand sequence thereof having 1 or 2 nucleoside substitutions, additions, or deletions. In some embodiments, the sense strand sequence comprises or consists of a sequence 100% identical to SEQ ID NO: 5987. The sense strand may comprise any modifications or modification pattern described herein. The sense strand may comprise a moiety such as a GalNAc moiety or a lipid moiety. In some embodiments, the siRNA comprises an antisense strand having a sequence in accordance with SEQ ID NO: 6011. In some embodiments, the antisense strand sequence comprises or consists of sequence at least 75% identical to SEQ ID NO: 6011, at least 80% identical to SEQ ID NO: 6011, at least 85% identical to SEQ ID NO: 6011, at least 90% identical to SEQ ID NO: 6011, or at least 95% identical to SEQ ID NO: 6011. In some embodiments, the antisense strand sequence comprises or consists of the sequence of SEQ ID NO 6011, or an antisense strand sequence thereof having 1, 2, 3, or 4 nucleoside substitutions, additions, or deletions. In some embodiments, the antisense strand sequence comprises or consists of the sequence of SEQ ID NO: 6011, or an antisense strand sequence thereof having 1 or 2 nucleoside substitutions, additions, or deletions. In some embodiments, the antisense strand sequence comprises or consists of a sequence 100% identical to SEQ ID NO: 6011. The antisense strand may comprise any modifications or modification pattern described herein. The antisense strand may comprise a moiety such as a GalNAc moiety or a lipid moiety.

[0057] In some embodiments, the siRNA comprises a sense strand having a sequence in accordance with SEQ ID NO: 2124. In some embodiments, the sense strand sequence comprises or consists of sequence at least 75% identical to SEQ ID NO: 2124, at least 80% identical to SEQ ID NO: 2124, at least 85% identical to SEQ ID NO: 2124, at least 90% identical to SEQ ID NO: 2124, or at least 95% identical to SEQ ID NO: 2124. In some embodiments, the sense strand sequence comprises or consists of the sequence of SEQ ID NO 2124, or a sense strand sequence thereof having 1, 2, 3, or 4 nucleoside substitutions, additions, or deletions. In some embodiments, the sense strand sequence comprises or consists of the sequence of SEQ ID NO: 2124, or a sense strand sequence thereof having 1 or 2 nucleoside substitutions, additions, or deletions. In some embodiments, the sense strand sequence comprises or consists of a sequence 100% identical to SEQ ID NO: 2124. The sense strand may comprise any modifications or modification pattern described herein. The sense strand may comprise a moiety such as a GalNAc moiety or a lipid moiety. In some embodiments, the siRNA comprises an antisense strand having a sequence in accordance with SEQ ID NO: 5022. In some embodiments, the antisense strand sequence comprises or consists of sequence at least 75% identical to SEQ ID NO: 5022, at least 80% identical to SEQ ID NO: 5022, at least 85% identical to SEQ ID NO: 5022, at least 90% identical to SEQ ID NO: 5022, or at least 95% identical to SEQ ID NO: 5022. In some embodiments, the antisense strand sequence comprises or consists of the sequence of SEQ ID NO 5022, or an antisense strand sequence thereof having 1, 2, 3, or 4 nucleoside substitutions, additions, or deletions. In some embodiments, the antisense strand sequence comprises or consists of the sequence of SEQ ID NO: 5022, or an antisense strand sequence thereof having 1 or 2 nucleoside substitutions, additions, or deletions. In some embodiments, the antisense strand sequence comprises or consists of a sequence 100% identical to SEQ ID NO: 5022. The antisense strand may comprise any modifications or modification pattern described herein. The antisense strand may comprise a moiety such as a GalNAc moiety or a lipid moiety.

[0058] In some embodiments, the siRNA comprises a sense strand having a sequence in accordance with SEQ ID NO: 5988. In some embodiments, the sense strand sequence comprises or consists of sequence at least 75% identical to SEQ ID NO: 5988, at least 80% identical to SEQ ID NO: 5988, at least 85% identical to SEQ ID NO: 5988, at least 90% identical to SEQ ID NO: 5988, or at least 95% identical to SEQ ID NO: 5988. In some embodiments, the sense strand sequence comprises or consists of the sequence of SEQ ID NO 5988, or a sense strand sequence thereof having 1, 2, 3, or 4 nucleoside substitutions, additions, or deletions. In some embodiments, the sense strand sequence comprises or consists of the sequence of SEQ ID NO: 5988, or a sense strand sequence thereof having 1 or 2 nucleoside substitutions, additions, or deletions. In some embodiments, the sense strand sequence comprises or consists of a sequence 100% identical to SEQ ID NO: 5988. The sense strand may comprise any modifications or modification pattern described herein. The sense strand may comprise a moiety such as a GalNAc moiety or a lipid moiety. In some embodiments, the siRNA comprises an antisense strand having a sequence in accordance with SEQ ID NO: 6012. In some embodiments, the antisense strand sequence comprises or consists of sequence at least 75% identical to SEQ ID NO: 6012, at least 80% identical to SEQ ID NO: 6012, at least 85% identical to SEQ ID NO: 6012, at least 90% identical to SEQ ID NO: 6012, or at least 95% identical to SEQ ID NO: 6012. In some embodiments, the antisense strand sequence comprises or consists of the sequence of SEQ ID NO 6012, or an antisense strand sequence thereof having 1, 2, 3, or 4 nucleoside substitutions, additions, or deletions. In some embodiments, the antisense strand sequence comprises or consists of the sequence of SEQ ID NO: 6012, or an antisense strand sequence thereof having 1 or 2 nucleoside substitutions, additions, or deletions. In some embodiments, the antisense strand sequence comprises or consists of a sequence 100% identical to SEQ ID NO: 6012. The antisense strand may comprise any modifications or modification pattern described herein. The antisense strand may comprise a moiety such as a GalNAc moiety or a lipid moiety.

### B. ASOs

[0059] In some embodiments, the composition comprises an oligonucleotide that inhibits the expression of PLIN1, wherein the oligonucleotide comprises an antisense oligonucleotide (ASO). In some embodiments, the ASO is 12-30 nucleosides in length. In some embodiments, the ASO is 14-30 nucleosides in length. In some embodiments, the ASO is at least about 10, 11, 12, 13, 14, 15, 16, 17, 18, 19, 20, 21, 22, 23, 24, 25, 26, 27, 28, 29, or 30 nucleosides in length, or a range defined by any of the two aforementioned numbers. In some embodiments, the ASO is 15-25 nucleosides in length. In some embodiments, the ASO is 20 nucleosides in length.

[0060] In some embodiments, the composition comprises an oligonucleotide that inhibits the expression of PLIN1, wherein the oligonucleotide comprises an ASO about 12-30 nucleosides in length and comprising a nucleoside sequence complementary to about 12-30 contiguous nucleosides of a full-length human PLIN1 mRNA sequence such as SEQ ID NO: 6014; wherein (i) the oligonucleotide comprises a modification comprising a modified nucleoside and/or a modified internucleoside linkage, and/or (ii) the composition comprises a pharmaceutically acceptable carrier. In some embodiments, the ASO comprise a nucleoside sequence complementary to at least about 10, 11, 12, 13, 14, 15, 16, 17, 18, 19, 20, 21, 22, 23, 24, 25, 26, 27, 28, 29, 30, or more contiguous nucleosides of one of SEQ ID NO: 6014.

### C. Modification Patterns

[0061] In some embodiments, the composition comprises an oligonucleotide that inhibits the expression of PLIN1, wherein the oligonucleotide comprises a modification comprising a modified nucleoside and/or a modified internucleoside linkage, and/or (ii) the composition comprises a pharmaceutically acceptable carrier. In some embodiments, the oligonucleotide comprises a modification comprising a modified nucleoside and/or a modified internucleoside linkage. In some embodiments, the oligonucleotide comprises a modified internucleoside linkage. In some embodiments, the modified internucleoside linkage comprises alkylphosphonate, phosphorothioate, methylphosphonate, phosphorodithioate, alkylphosphonothioate, phosphoramidate, carbamate, carbonate, phosphate triester, acetamidate, or carboxymethyl ester, or a combination thereof. In some embodiments, the modified internucleoside linkage comprises one or more phosphorothioate linkages. A phosphorothioate may include a nonbridging oxygen atom in a phosphate backbone of the oligonucleotide that is replaced by sulfur. Modified internucleoside linkages may be included in siRNAs or ASOs. Benefits of the modified internucleoside linkage may include decreased toxicity or improved pharmacokinetics.

[0062] In some embodiments, the composition comprises an oligonucleotide that inhibits the expression of PLIN1, wherein the oligonucleotide comprises a modified internucleoside linkage, wherein the oligonucleotide comprises 1, 2, 3, 4, 5, 6, 7, 8, 9, 10, 11, 12, 13, 14, 15, 16, 17, 18, 19, or 20 modified internucleoside linkages, or a range of modified internucleoside linkages defined by any two of the aforementioned numbers. In some embodiments, the oligonucleotide comprises no more than 18 modified internucleoside linkages. In some embodiments, the oligonucleotide comprises no more than 20 modified internucleoside linkages. In some embodiments, the oligonucleotide comprises 2 or more modified internucleoside linkages, 3 or more modified internucleoside linkages, 4 or more modified internucleoside linkages, 5 or more modified internucleoside linkages, 6 or more modified internucleoside linkages, 7 or more modified internucleoside linkages, 8 or more modified internucleoside linkages, 9 or more modified internucleoside linkages, 10 or more modified internucleoside linkages, 11 or more modified internucleoside linkages, 12 or more modified internucleoside linkages, 13 or more modified internucleoside linkages, 14 or more modified internucleoside linkages, 15 or more modified internucleoside linkages, 16 or more modified internucleoside linkages, 17 or more modified internucleoside linkages, 18 or more modified internucleoside linkages, 19 or more modified internucleoside linkages, or 20 or more modified internucleoside linkages.

[0063] In some embodiments, the composition comprises an oligonucleotide that inhibits the expression of PLIN1, wherein the oligonucleotide comprises the modified nucleoside. In some embodiments, the modified nucleoside comprises a locked nucleic acid (LNA), hexitol nucleic acid (HLA), cyclohexene nucleic acid (CeNA), 2′-methoxyethyl, 2′-O-alkyl, 2′-O-allyl, 2′-fluoro, or 2′-deoxy, or a combination thereof. In some embodiments, the modified nucleoside comprises a LNA. In some embodiments, the modified nucleoside comprises a 2′,4′ constrained ethyl nucleic acid. In some embodiments, the modified nucleoside comprises HLA. In some embodiments, the modified nucleoside comprises CeNA. In some embodiments, the modified nucleoside comprises a 2′-methoxyethyl group. In some embodiments, the modified nucleoside comprises a 2′-O-alkyl group. In some embodiments, the modified nucleoside comprises a 2′-O-allyl group. In some embodiments, the modified nucleoside comprises a 2′-fluoro group. In some embodiments, the modified nucleoside comprises a 2′-deoxy group. In some embodiments, the modified nucleoside comprises a 2′-O-methyl nucleoside, 2′-deoxyfluoro nucleoside, 2′-O—N-methylacetamido (2′-O-NMA) nucleoside, a 2′-O-dimethylaminoethoxyethyl (2′-O-DMAEOE) nucleoside, 2′-O-aminopropyl (2′-O-AP) nucleoside, or 2′-ara-F, or a combination thereof. In some embodiments, the modified nucleoside comprises a 2′-O-methyl nucleoside. In some embodiments, the modified nucleoside comprises a 2′-deoxyfluoro nucleoside. In some embodiments, the modified nucleoside comprises a 2′-O-NMA nucleoside. In some embodiments, the modified nucleoside comprises a 2′-O-DMAEOE nucleoside. In some embodiments, the modified nucleoside comprises a 2′-O-aminopropyl (2′-O-AP) nucleoside. In some embodiments, the modified nucleoside comprises 2′-ara-F. In some embodiments, the modified nucleoside comprises one or more 2′ fluoro modified nucleosides. In some embodiments, the modified nucleoside comprises a 2′ O-alkyl modified nucleoside. Benefits of the modified nucleoside may include decreased toxicity or improved pharmacokinetics.

[0064] In some embodiments, the oligonucleotide comprises 1, 2, 3, 4, 5, 6, 7, 8, 9, 10, 11, 12, 13, 14, 15, 16, 17, 18, 19, 20, or 21 modified nucleosides, or a range of nucleosides defined by any two of the aforementioned numbers. In some embodiments, the oligonucleotide comprises no more than 19 modified nucleosides. In some embodiments, the oligonucleotide comprises no more than 21 modified nucleosides. In some embodiments, the oligonucleotide comprises 2 or more modified nucleosides, 3 or more modified nucleosides, 4 or more modified nucleosides, 5 or more modified nucleosides, 6 or more modified nucleosides, 7 or more modified nucleosides, 8 or more modified nucleosides, 9 or more modified nucleosides, 10 or more modified nucleosides, 11 or more modified nucleosides, 12 or more modified nucleosides, 13 or more modified nucleosides, 14 or more modified nucleosides, 15 or more modified nucleosides, 16 or more modified nucleosides, 17 or more modified nucleosides, 18 or more modified nucleosides, 19 or more modified nucleosides, 20 or more modified nucleosides, or 21 or more modified nucleosides.

[0065] The oligonucleotide may include purines. Examples of purines include adenine (A) or guanine (G), or modified versions thereof. The oligonucleotide may include pyrimidines. Examples of pyrimidines include cytosine (C), thymine (T), or uracil (U), or modified versions thereof.

[0066] In some embodiments, purines of the oligonucleotide comprise 2′ fluoro modified purines. In some embodiments, purines of the oligonucleotide comprise 2′-O-methyl modified purines. In some embodiments, purines of the oligonucleotide comprise a mixture of 2′ fluoro and 2-O-methyl modified purines. In some embodiments, all purines of the oligonucleotide comprise 2′ fluoro modified purines. In some embodiments, all purines of the oligonucleotide comprise 2′-O-methyl modified purines. In some embodiments, all purines of the oligonucleotide comprise a mixture of 2′ fluoro and 2′-O-methyl modified purines. Where 2′-O-methyl modifications are described, it is contemplated that a 2-methyl modification may be included, and vice versa.

[0067] In some embodiments, pyrimidines of the oligonucleotide comprise 2′ fluoro modified pyrimidines. In some embodiments, pyrimidines of the oligonucleotide comprise 2′-O-methyl modified pyrimidines. In some embodiments, pyrimidines of the oligonucleotide comprise a mixture of 2′ fluoro and 2′-O-methyl modified pyrimidines. In some embodiments, all pyrimidines of the oligonucleotide comprise 2′ fluoro modified pyrimidines. In some embodiments, all pyrimidines of the oligonucleotide comprise 2-O-methyl modified pyrimidines. In some embodiments, all pyrimidines of the oligonucleotide comprise a mixture of 2′ fluoro and 2-O-methyl modified pyrimidines.

[0068] In some embodiments, purines of the oligonucleotide comprise 2′ fluoro modified purines, and pyrimidines of the oligonucleotide comprise a mixture of 2′ fluoro and 2′-O-methyl modified pyrimidines. In some embodiments, purines of the oligonucleotide comprise 2′-O-methyl modified purines, and pyrimidines of the oligonucleotide comprise a mixture of 2′ fluoro and 2′-O-methyl modified pyrimidines. In some embodiments, purines of the oligonucleotide comprise 2′ fluoro modified purines, and pyrimidines of the oligonucleotide comprise 2-O-methyl modified pyrimidines. In some embodiments, purines of the oligonucleotide comprise 2′-O-methyl modified purines, and pyrimidines of the oligonucleotide comprise 2′ fluoro modified pyrimidines. In some embodiments, pyrimidines of the oligonucleotide comprise 2′ fluoro modified pyrimidines, and purines of the oligonucleotide comprise a mixture of 2′ fluoro and 2′-O-methyl modified purines. In some embodiments, pyrimidines of the oligonucleotide comprise 2′-O-methyl modified pyrimidines, and purines of the oligonucleotide comprise a mixture of 2′ fluoro and 2′-O-methyl modified purines. In some embodiments, pyrimidines of the oligonucleotide comprise 2′ fluoro modified pyrimidines, and purines of the oligonucleotide comprise 2′-O-methyl modified purines. In some embodiments, pyrimidines of the oligonucleotide comprise 2′-O-methyl modified pyrimidines, and purines of the oligonucleotide comprise 2′ fluoro modified purines.

[0069] In some embodiments, all purines of the oligonucleotide comprise 2′ fluoro modified purines, and all pyrimidines of the oligonucleotide comprise a mixture of 2′ fluoro and 2″-O-methyl modified pyrimidines. In some embodiments, all purines of the oligonucleotide comprise 2″-O-methyl modified purines, and all pyrimidines of the oligonucleotide comprise a mixture of 2′ fluoro and 2′-O-methyl modified pyrimidines. In some embodiments, all purines of the oligonucleotide comprise 2′ fluoro modified purines, and all pyrimidines of the oligonucleotide comprise 2-O-methyl modified pyrimidines. In some embodiments, all purines of the oligonucleotide comprise 2′-O-methyl modified purines, and all pyrimidines of the oligonucleotide comprise 2′ fluoro modified pyrimidines. In some embodiments, all pyrimidines of the oligonucleotide comprise 2′ fluoro modified pyrimidines, and all purines of the oligonucleotide comprise a mixture of 2′ fluoro and 2′-O-methyl modified purines. In some embodiments, all pyrimidines of the oligonucleotide comprise 2′-O-methyl modified pyrimidines, and all purines of the oligonucleotide comprise a mixture of 2′ fluoro and 2′-O-methyl modified purines. In some embodiments, all pyrimidines of the oligonucleotide comprise 2′ fluoro modified pyrimidines, and all purines of the oligonucleotide comprise 2′-O-methyl modified purines. In some embodiments, all pyrimidines of the oligonucleotide comprise 2′-O-methyl modified pyrimidines, and all purines of the oligonucleotide comprise 2′ fluoro modified purines.

[0070] In some cases, the oligonucleotide comprises a particular modification pattern. In some embodiments, position 9 counting from the 5′ end of the of a strand of the oligonucleotide may have a 2′F modification. In some embodiments, when position 9 of a strand of the oligonucleotide is a pyrimidine, then all purines in a strand of the oligonucleotide have a 2′OMe modification. In some embodiments, when position 9 is the only pyrimidine between positions 5 and 11 of the sense stand, then position 9 is the only position with a 2′F modification in a strand of the oligonucleotide. In some embodiments, when position 9 and only one other base between positions 5 and 11 of a strand of the oligonucleotide are pyrimidines, then both of these pyrimidines are the only two positions with a 2′F modification in a strand of the oligonucleotide. In some embodiments, when position 9 and only two other bases between positions 5 and 11 of a strand of the oligonucleotide are pyrimidines, and those two other pyrimidines are in adjacent positions so that there would be not three 2′F modifications in a row, then any combination of 2′F modifications can be made that give three 2′F modifications in total. In some embodiments, when there are more than 2 pyrimidines between positions 5 and 11 of a strand of the oligonucleotide, then all combinations of pyrimidines having the 2′F modification are allowed that have three to five 2′F modifications in total, provided that a strand of the oligonucleotide does not have three 2′F modifications in a row. In some cases, a strand of the oligonucleotide of any of the siRNAs comprises a modification pattern which conforms to any or all of these a strand of the oligonucleotide rules.

[0071] In some embodiments, when position 9 of a strand of the oligonucleotide is a purine, then all purines in a strand of the oligonucleotide have a 2′OMe modification. In some embodiments, when position 9 is the only purine between positions 5 and 11 of the sense stand, then position 9 is the only position with a 2′F modification in a strand of the oligonucleotide. In some embodiments, when position 9 and only one other base between positions 5 and 11 of a strand of the oligonucleotide are purines, then both of these purines are the only two positions with a 2′F modification in a strand of the oligonucleotide. In some embodiments, when position 9 and only two other bases between positions 5 and 11 of a strand of the oligonucleotide are purines, and those two other purines are in adjacent positions so that there would be not three 2′F modifications in a row, then any combination of 2′F modifications can be made that give three 2′F modifications in total. In some embodiments, when there are more than 2 purines between positions 5 and 11 of a strand of the oligonucleotide, then all combinations of purines having the 2′F modification are allowed that have three to five 2′F modifications in total, provided that a strand of the oligonucleotide does not have three 2′F modifications in a row. In some cases, a strand of the oligonucleotide of any of the siRNAs comprises a modification pattern which conforms to any or all of these a strand of the oligonucleotide rules.

[0072] In some cases, position 9 of a strand of the oligonucleotide can be a 2 deoxy. In these cases. 2′F and 2′OMe modifications may occur at the other positions of a strand of the oligonucleotide. In some cases, a strand of the oligonucleotide of any of the siRNAs comprises a modification pattern which conforms to these a strand of the oligonucleotide rules.

[0073] In some embodiments, position nine of the sense strand comprises a 2′ fluoro-modified pyrimidine. In some embodiments, all purines of the sense strand comprise 2′-O-methyl modified purines. In some embodiments, 1, 2, 3, 4, or 5 pyrimidines between positions 5 and 11 comprise a 2′ fluoro-modified pyrimidine, provided there are not three 2′ fluoro-modified pyrimidines in a row: In some embodiments, the odd-numbered positions of the antisense strand comprise 2′-O-methyl modified nucleotides. In some embodiments, the even-numbered positions of the antisense strand comprise 2 fluoro-modified nucleotides and unmodified deoxyribonucleotide. In some embodiments, the even-numbered positions of the antisense strand comprise 2 fluoro-modified nucleotides, 2′-O-methyl modified nucleotides and unmodified deoxyribonucleotide. In some embodiments, position nine of the sense strand comprises a 2′ fluoro-modified pyrimidine; all purines of the sense strand comprises 2′-O-methyl modified purines: 1, 2, 3, 4, or 5 pyrimidines between positions 5 and 11 comprise a 2′ fluoro-modified pyrimidine, provided there are not three 2′ fluoro-modified pyrimidines in a row: the odd-numbered positions of the antisense strand comprise 2′-O-methyl modified nucleotides; and the even-numbered positions of the antisense strand comprise 2 fluoro-modified nucleotides and unmodified deoxyribonucleotides.

[0074] In some embodiments, position nine of the sense strand comprises a 2′ fluoro-modified purine. In some embodiments, all pyrimidines of the sense strand comprise 2′-O-methyl modified purines. In some embodiments, 1, 2, 3, 4, or 5 purines between positions 5 and 11 comprise a 2′ fluoro-modified purine, provided there are not three 2′ fluoro-modified purine in a row. In some embodiments, the odd-numbered positions of the antisense strand comprise 2-O-methyl modified nucleotides. In some embodiments, the even-numbered positions of the antisense strand comprise 2 fluoro-modified nucleotides and unmodified deoxyribonucleotide. In some embodiments, the even-numbered positions of the antisense strand comprise 2′ fluoro-modified nucleotides, 2-O-methyl modified nucleotides and unmodified deoxyribonucleotide. In some embodiments, position nine of the sense strand comprises a 2′ fluoro-modified purine; all pyrimidine of the sense strand comprises 2′-O-methyl modified pyrimidines: 1, 2, 3, 4, or 5 purines between positions 5 and 11 comprise a 2 fluoro-modified purines, provided there are not three 2′ fluoro-modified purines in a row: the odd-numbered positions of the antisense strand comprise 2′-O-methyl modified nucleotides; and the even-numbered positions of the antisense strand comprise 2 fluoro-modified nucleotides and unmodified deoxyribonucleotides. In some embodiments, there are not three 2′ fluoro-modified purines in a row. In some embodiments, there are not three 2′ fluoro-modified pyrimidines in a row.

[0075] In some embodiments, position nine of the sense strand comprises an unmodified deoxyribonucleotide. In some embodiments, positions 5, 7, and 8 of the sense strand comprise 2 fluoro-modified nucleotides. In some embodiments, all pyrimidines in positions 10 to 21 of the sense strand comprise 2′-O-methyl modified pyrimidines and all purines in positions 10 to 21 of the comprise 2′-O-methyl modified purines or 2′ fluoro-modified purines. In some embodiments, the odd-numbered positions of the antisense strand comprise 2-O-methyl modified nucleotides. In some embodiments, the even-numbered positions of the antisense strand comprise 2′ fluoro-modified nucleotides and unmodified deoxyribonucleotides. In some embodiments, the even-numbered positions of the antisense strand comprise 2 fluoro-modified nucleotides, 2′-O-methyl modified nucleotides and unmodified deoxyribonucleotides. In some embodiments, position nine of the sense strand comprises an unmodified deoxyribonucleotide: positions 5, 7, and 8 of the sense strand comprise 2 fluoro-modified nucleotides; all pyrimidines in positions 10 to 21 of the sense strand comprise 2′-O-methyl modified pyrimidines and all purines in positions 10 to 21 of the comprise 2′-O-methyl modified purines or 2 fluoro-modified purines: the odd-numbered positions of the antisense strand comprise 2′-O-methyl modified nucleotides; and the even-numbered positions of the antisense strand comprise 2 fluoro-modified nucleotides and unmodified deoxyribonucleotides.

[0076] In some embodiments, position nine of the sense strand comprises an unmodified deoxyribonucleotide. In some embodiments, positions 5, 7, and 8 of the sense strand comprise 2 fluoro-modified nucleotides. In some embodiments, all purines in positions 10 to 21 of the sense strand comprise 2′-O-methyl modified purines and all pyrimidines in positions 10 to 21 of the comprise 2′-O-methyl modified pyrimidines or 2 fluoro-modified pyrimidines. In some embodiments, the odd-numbered positions of the antisense strand comprise 2-O-methyl modified nucleotides. In some embodiments, the even-numbered positions of the antisense strand comprise 2′ fluoro-modified nucleotides and unmodified deoxyribonucleotides. In some embodiments, the even-numbered positions of the antisense strand comprise 2 fluoro-modified nucleotides, 2′-O-methyl modified nucleotides and unmodified deoxyribonucleotides. In some embodiments, position nine of the sense strand comprises an unmodified deoxyribonucleotide: positions 5, 7, and 8 of the sense strand comprise 2 fluoro-modified nucleotides; all purines in positions 10 to 21 of the sense strand comprise 2′-O-methyl modified purines and all pyrimidines in positions 10 to 21 of the comprise 2′-O-methyl modified pyrimidines or 2′ fluoro-modified pyrimidines: the odd-numbered positions of the antisense strand comprise 2′-O-methyl modified nucleotides; and the even-numbered positions of the antisense strand comprise 2 fluoro-modified nucleotides and unmodified deoxyribonucleotide.

[0077] In some embodiments, the composition comprises an oligonucleotide that inhibits the expression of PLIN1, wherein the oligonucleotide comprises a moiety attached at a 3′ or 5′ terminus of the oligonucleotide. Examples of moieties include a hydrophobic moiety or a sugar moiety, or a combination thereof. In some embodiments, the oligonucleotide is an siRNA having a sense strand, and the moiety is attached to a 5′ end of the sense strand. In some embodiments, the oligonucleotide is an siRNA having a sense strand, and the moiety is attached to a 3′ end of the sense strand. In some embodiments, the oligonucleotide is an siRNA having an antisense strand, and the moiety is attached to a 5′ end of the antisense strand. In some embodiments, the oligonucleotide is an siRNA having an antisense strand, and the moiety is attached to a 3′ end of the antisense strand. In some embodiments, the oligonucleotide is an ASO, and the moiety is attached to a 5′ end of the ASO. In some embodiments, the oligonucleotide is an ASO, and the moiety is attached to a 3′ end of the ASO.

[0078] In some embodiments, the oligonucleotide includes a negatively charged group. The negatively charged group may aid in cell or tissue penetration. The negatively charged group may be attached at a 5′ or 3′ end (e.g, a 5′ end) of the oligonucleotide. This may be referred to as an end group. The end group may be or include a phosphorothioate, phosphorodithioate, vinylphosphonate, methylphosphonate, cyclopropyl phosphonate, or a deoxy-C-malonyl. The end group may include an extra 5′ phosphate such as an extra 5′ phosphate. A combination of end groups may be used.

[0079] In some embodiments, the oligonucleotide includes a phosphate mimic. In some embodiments, the phosphate mimic comprises vinyl phosphonate. In some embodiments, the vinyl phosphonate comprises a trans-vinylphosphonate. In some embodiments, the vinyl phosphonate comprises a cis-vinylphosphonate. An example of a nucleotide that includes a vinyl phosphonate is shown below.

[chemical structure]

[0080] In some embodiments, the vinyl phosphonate increases the stability of the oligonucleotide. In some embodiments, the vinyl phosphonate increases the accumulation of the oligonucleotide in tissues. In some embodiments, the vinyl phosphonate protects the oligonucleotide from an exonuclease or a phosphatase. In some embodiments, the vinyl phosphonate improves the binding affinity of the oligonucleotide with the siRNA processing machinery.

[0081] In some embodiments, the oligonucleotide includes 1 vinyl phosphonate. In some embodiments, the oligonucleotide includes 2 vinyl phosphonates. In some embodiments, the oligonucleotide includes 3 vinyl phosphonates. In some embodiments, the oligonucleotide includes 4 vinyl phosphonates. In some embodiments, the antisense strand of the oligonucleotide comprises a vinyl phosphonate at the 5′ end. In some embodiments, the antisense strand of the oligonucleotide comprises a vinyl phosphonate at the 3′ end. In some embodiments, the sense strand of the oligonucleotide comprises a vinyl phosphonate at the 5′ end. In some embodiments, the sense strand of the oligonucleotide comprises a vinyl phosphonate at the 3′ end.

### 1. Hydrophobic Moieties

[0082] In some embodiments, the composition comprises an oligonucleotide that inhibits the expression of PLIN1, wherein the oligonucleotide comprises a hydrophobic moiety. The hydrophobic moiety may be attached at a 3′ or 5′ terminus of the oligonucleotide. The hydrophobic moiety may include a lipid such as a fatty acid. The hydrophobic moiety may include a hydrocarbon. The hydrocarbon may be linear. The hydrocarbon may be non-linear. The hydrophobic moiety may include a lipid moiety or a cholesterol moiety, or a combination thereof.

[0083] In some embodiments, the composition comprises an oligonucleotide that inhibits the expression of PLIN1, wherein the oligonucleotide comprises a lipid attached at a 3′ or 5′ terminus of the oligonucleotide. An oligonucleotide comprising a hydrophobic moiety may include, or be referred to as a hydrophobic conjugate. Hydrophobic moieties may be useful for enhancing cellular uptake. The hydrophobic moiety may be attached at a 3′ or 5′ terminus of the oligonucleotide. The hydrophobic moiety may include a lipid such as a fatty acid. The hydrophobic moiety may include a hydrocarbon. The hydrocarbon may be linear. The hydrocarbon may be non-linear. The hydrophobic moiety may include a lipid moiety or a cholesterol moiety, or a combination thereof. In some embodiments, the hydrophobic moiety includes a lipid. In some embodiments, the hydrophobic moiety includes a cyclohexanyl. In some embodiments, the hydrophobic moiety is used in a specific format described herein. In some embodiments, the hydrophobic moiety is attached at a 5′ end of a sense strand without any phosphorothioate groups or linkages at the 5′ end.

[0084] The hydrophobic moiety may be or include a lipid moiety. In some embodiments, the composition comprises an oligonucleotide that inhibits the expression of PLIN1, wherein the oligonucleotide comprises a lipid attached at a 3′ or 5′ terminus of the oligonucleotide. In some embodiments, the lipid comprises cholesterol, myristyl, palmityl, stearyl, lithocholyl, docosenyl, docosahexaenoyl, myristyl, palmityl stearyl, or α-tocopheryl, or a combination thereof. In some embodiments, the lipid comprises stearoyl, t-butylphenol, n-butylphenyl, octylphenyl, dodecylphenyl, phenyl n-dodecyl, octadecylbenzamide, hexadecylbenzamide, or octadecylcyclohexyl. In some embodiments, the lipid comprises phenyl para C12.

[0085] In some embodiments, the oligonucleotide comprises any aspect of the following structure:

[chemical structure]

In some embodiments, the oligonucleotide comprises any aspect of the following structure:

[chemical structure]

In some embodiments, the oligonucleotide comprises any aspect of the following structure:

[chemical structure]

The aspect included in the oligonucleotide may include the entire structure, or may include the lipid moiety, of any of the structures shown. In some embodiments, n is 1-3. In some embodiments, n is 1. In some embodiments, n is 2. In some embodiments, n is 3. In some embodiments, R is an alkyl group. In some embodiments, the alkyl group contains 1, 2, 3, 4, 5, 6, 7, 8, 9, 10, 11, 12, 13, 14, 15, 16, 17, 18, 19, or 20 carbons. In some embodiments, the alkyl group contains 4, 5, 6, 7, 8, 9, 10, 11, 12, 13, 14, 15, 16, 17, or 18 carbons, or a range defined by any two of the aforementioned numbers of carbons. In some embodiments, the alkyl group contains 4-18 carbons. In some embodiments, the lipid moiety comprises an alcohol or ether.

[0086] In some embodiments, the lipid includes a fatty acid. In some embodiments, the lipid comprises a lipid depicted in Table 1. The example lipid moieties in Table 1 are shown attached at a 5′ end of an oligonucleotide, in which the 5′ terminal phosphate of the oligonucleotide is shown with the lipid moiety. In some embodiments, a lipid moiety in Table 1 may be attached at a different point of attachment than shown. For example, the point of attachment of any of the lipid moieties in the table may be at a 3′ oligonucleotide end. In some embodiments, the lipid is used for targeting the oligonucleotide to a non-hepatic cell or tissue.

TABLE 1
Lipid moiety examples

| Description | Name | Example depiction attached to an oligonucleotide |
|---|---|---|
| cholesterol-TEG | ETL2 | [chemical structure] |
| stearyl | ETL3 | [chemical structure] |
| t-butylphenyl | ETL7 | [chemical structure] |
| n-butylphenyl | ETL8 | [chemical structure] |
| octylphenyl | ETL9 | [chemical structure] |
| dodecylphenyl | ETL10 | [chemical structure] |
| phenyl n-dodecyl | ETL12 | [chemical structure] |
| octadecylbenzamide | ETL13 | [chemical structure] |
| hexadecylbenzamide | ETL15 | [chemical structure] |
| octadecylcyclohexyl | ETL16 | [chemical structure] |

[0087] In some embodiments, the lipid or lipid moiety includes 16 to 18 carbons. In some embodiments, the lipid includes 16 carbons. In some embodiments, the lipid includes 17 carbons. In some embodiments, the lipid includes 18 carbons. In some embodiments, the lipid moiety includes 16 carbons. In some embodiments, the lipid moiety includes 17 carbons. In some embodiments, the lipid moiety includes 18 carbons.

[0088] The hydrophobic moiety may include a linker that comprises a carbocycle. The carbocycle may be six-membered. Some examples of a carbocycle include phenyl or cyclohexyl. The linker may include a phenyl. The linker may include a cyclohexyl. The lipid may be attached to the carbocycle, which may in turn be attached at a phosphate (e.g., 5′ or 3′ phosphate) of the oligonucleotide. In some embodiments, the lipid or hydrocarbon, and the end of the sense are connected to the phenyl or cyclohexyl linker in the 1,4; 1,3; or 1,2 substitution pattern (e.g, the para, meta, or ortho phenyl configuration). In some embodiments, the lipid or hydrocarbon, and the end of the sense are connected to the phenyl or cyclohexyl linker in the 1,4 substitution pattern (e.g, the para phenyl configuration). The lipid may be attached to the carbocycle in the 1,4 substitution pattern relative to the oligonucleotide. The lipid may be attached to the carbocycle in the 1,3 substitution pattern relative to the oligonucleotide. The lipid may be attached to the carbocycle in the 1,2 substitution pattern relative to the oligonucleotide. The lipid may be attached to the carbocycle in the ortho orientation relative to the oligonucleotide. The lipid may be attached to the carbocycle in the para orientation relative to the oligonucleotide. The lipid may be attached to the carbocycle in the meta orientation relative to the oligonucleotide.

[0089] The lipid moiety may comprise or consist of the following structure:

[chemical structure]

In some embodiments, the lipid moiety comprises or consists of the following structure:

[chemical structure]

In some embodiments, the lipid moiety comprises or consists of the following structure:

[chemical structure]

In some embodiments, the lipid moiety comprises or consist of the following structure:

[chemical structure]

In some embodiments, the dotted line indicates a covalent connection. The covalent connection may between an end of the sense or antisense strand. For example, the connection may be to the 5′ end of the sense strand. In some embodiments, n is 0-3. In some embodiments, n is 1-3. In some embodiments, n is 0. In some embodiments, n is 1. In some embodiments, n is 2. In some embodiments, n is 3. In some embodiments, n is 4. In some embodiments, n is 5. In some embodiments, n is 1, 2, 3, 4, 5, 6, 7, 8, 9, or 10. In some embodiments, R is an alkyl group. In some embodiments, the alkyl group contains 1, 2, 3, 4, 5, 6, 7, 8, 9, 10, 11, 12, 13, 14, 15, 16, 17, 18, 19, or 20 carbons. In some embodiments, the alkyl group contains 4, 5, 6, 7, 8, 9, 10, 11, 12, 13, 14, 15, 16, 17, or 18 carbons, or a range defined by any two of the aforementioned numbers of carbons. In some embodiments, R comprises or consists of an alkyl group containing 4-18 carbons.

[0090] The lipid moiety may be attached at a 5′ end of the oligonucleotide. The 5′ end may have one phosphate linking the lipid moiety to a 5′ carbon of a sugar of the oligonucleotide. The 5′ end may have two phosphates linking the lipid moiety to a 5′ carbon of a sugar of the oligonucleotide. The 5′ end may have three phosphates linking the lipid moiety to a 5′ carbon of a sugar of the oligonucleotide. The 5′ end may have one phosphate connected to the 5′ carbon of a sugar of the oligonucleotide, where the one phosphate is connected to the lipid moiety. The 5′ end may have two phosphates connected to the 5′ carbon of a sugar of the oligonucleotide, where the one of the two phosphates is connected to the lipid moiety. The 5′ end may have three phosphates connected to the 5′ carbon of a sugar of the oligonucleotide, where the one of the three phosphates is connected to the lipid moiety. The sugar may include a ribose. The sugar may include a deoxyribose. The sugar may be modified a such as a 2′ modified sugar (e.g, a 2′ O-methyl or 2′ fluoro ribose). A phosphate of the 5′ end may include a modification such as a sulfur in place of an oxygen. Two phosphates of the 5′ end may include a modification such as a sulfur in place of an oxygen. Three phosphates of the 5′ end may include a modification such as a sulfur in place of an oxygen.

[0091] In some embodiments, the oligonucleotide includes 1 lipid moiety. In some embodiments, the oligonucleotide includes 2 lipid moieties. In some embodiments, the oligonucleotide includes 3 lipid moieties. In some embodiments, the oligonucleotide includes 4 lipid moieties.

[0092] Some embodiments relate to a method of making an oligonucleotide comprising a hydrophobic conjugate. A strategy for making hydrophobic conjugates may include use of a phosphoramidite reagent based upon a 6-membered ring alcohol such as a phenol or cyclohexanol. The phosphoramidite may be reacted to a nucleotide to connect the nucleotide to the hydrophobic moiety, and thereby produce the hydrophobic conjugate. Some examples of phosphoramidite reagents that may be used to produce a hydrophobic conjugate are provided as follows:

[chemical structure]

[0093] In some embodiments, n is 1-3. In some embodiments, n is 1. In some embodiments, n is 2. In some embodiments, n is 3. In some embodiments, R is an alkyl group. In some embodiments, the alkyl group contains 1, 2, 3, 4, 5, 6, 7, 8, 9, 10, 11, 12, 13, 14, 15, 16, 17, 18, 19, or 20 carbons. In some embodiments, the alkyl group contains 4, 5, 6, 7, 8, 9, 10, 11, 12, 13, 14, 15, 16, 17, or 18 carbons, or a range defined by any two of the aforementioned numbers of carbons. In some embodiments, R comprises or consists of an alkyl group containing 4-18 carbons. Any one of the phosphoramidite reagents may be reacted to a 5′ end of an oligonucleotide to produce an oligonucleotide comprising a hydrophobic moiety. In some embodiments, the phosphoramidite reagents is reacted to a 5′ end of a sense strand of an siRNA. The sense strand may then be hybridized to an antisense strand to form a duplex. The hybridization may be performed by incubating the sense and antisense strands in solution at a given temperature. The temperature may be gradually reduced. The temperature may comprise or include a temperature comprising an annealing temperature for the sense and antisense strands. The temperature may be below or include a temperature below the annealing temperature for the sense and antisense strands. The temperature may be below a melting temperature of the sense and antisense strands.

[0094] ETL2 may be conjugated to an oligonucleotide using the following reagent:

[chemical structure]

### 2. Sugar Moieties

[0095] In some embodiments, the composition comprises an oligonucleotide that inhibits the expression of PLIN1, wherein the oligonucleotide comprises a sugar moiety. The sugar moiety may include an N-acetyl galactose moiety (e.g, an N-acetylgalactosamine (GalNAc) moiety), an N-acetyl glucose moiety (e.g, an N-acetylglucosamine (GlcNAc) moiety), a fucose moiety, or a mannose moiety. The sugar moiety may include 1, 2, 3, or more sugar molecules. The sugar moiety may be attached at a 3′ or 5′ terminus of the oligonucleotide. The sugar moiety may include an N-acetyl galactose moiety. The sugar moiety may include an N-acetylgalactosamine (GalNAc) moiety. The sugar moiety may include an N-acetyl glucose moiety. The sugar moiety may include N-acetylglucosamine (GlcNAc) moiety. The sugar moiety may include a fucose moiety. The sugar moiety may include a mannose moiety. N-acetyl glucose, GlcNAc, fucose, or mannose may be useful for targeting macrophages since they may target or bind a mannose receptor such as CD206. The sugar moiety may be useful for binding or targeting an asialoglycoprotein receptor such as an asialoglycoprotein receptor of a hepatocyte. The GalNAc moiety may bind to an asialoglycoprotein receptor. The GalNAc moiety may target a hepatocyte.

[0096] In some embodiments, the composition comprises an oligonucleotide that inhibits the expression of PLIN1, wherein the oligonucleotide comprises an N-acetylgalactosamine (GalNAc) moiety. GalNAc may be useful for hepatocyte targeting. The GalNAc moiety may include 1, 2, 3, or more GalNAc molecules. The GalNAc moiety may be attached at a 3′ or 5′ terminus of the oligonucleotide.

[0097] In some embodiments, the composition comprises an oligonucleotide that inhibits the expression of PLIN1, wherein the oligonucleotide comprises an N-acetylgalactosamine (GalNAc) ligand for hepatocyte targeting. In some embodiments, the composition comprises GalNAc. In some embodiments, the composition comprises a GalNAc derivative. In some embodiments, the GalNAc ligand is attached at a 3′ terminus of the oligonucleotide. In some embodiments, the GalNAc ligand is attached at a 5′ terminus of the oligonucleotide. In some embodiments, the composition comprises a sense strand, and the GalNAc ligand is attached to the sense strand (e.g. attached to a 5′ end of the sense strand, or attached to a 3′ end of the sense strand). In some embodiments, the composition comprises an antisense strand, and the GalNAc ligand is attached to the antisense strand (e.g. attached to a 5′ end of the antisense strand, or attached to a 3′ end of the antisense strand). In some embodiments, the composition comprises a GalNAc ligand attached at a 3′ or 5′ terminus of the oligonucleotide.

[0098] Disclosed herein, in some embodiments, are compositions comprising an oligonucleotide that inhibits the expression of PLIN1, wherein the oligonucleotide comprises a GalNAc moiety. The GalNAc moiety may be included in any formula, structure, or GalNAc moiety shown below. In some embodiments, described herein is a compound (e.g. oligonucleotide) represented by Formula (I) or (II):

[chemical structure]

or a salt thereof, wherein
[0099] J is an oligonucleotide:
[0100] each w is independently selected from any value from 1 to 20;
[0101] each v is independently selected from any value from 1 to 20;
[0102] n is selected from any value from 1 to 20;
[0103] m is selected from any value from 1 to 20;
[0104] z is selected from any value from 1 to 3, wherein
   [0105] if z is 3, Y is C
   [0106] if z is 2, Y is CR⁶, or
   [0107] if z is 1, Y is C(R⁶)₂;
[0108] Q is selected from:
   [0109] C3-10 carbocycle optionally substituted with one or more substituents independently selected from halogen, —CN, —NO₂, —OR⁷, —SR⁷, —N(R⁷)₂, —C(O)R⁷, —C(O)N(R⁷)₂, —N(R⁷)C(O)R⁷, —N(R⁷)C(O)N(R⁷)₂, —OC(O)N(R⁷)₂, —N(R⁷)C(O)OR⁷, —C(O)OR⁷, —OC(O)R⁷, —S(O)R⁷, and C1-6 alkyl, wherein the C1-6 alkyl, is optionally substituted with one or more substituents independently selected from halogen, —CN, —OH, —SH, —NO₂, and —NH₂:
[0110] R¹ is a linker selected from:
   [0111] —O—, —S—, —N(R⁷)—, —C(O)—, —C(O)N(R⁷)—, —N(R⁷)C(O)— —N(R⁷)C(O)N(R⁷)—, —OC(O)N(R⁷)—, —N(R⁷)C(O)O—, —C(O)O—, —OC(O)—, —S(O)—, —S(O)₂—, —OS(O)—, —OP(O)(OR⁷)O—, —SP(O)(OR⁷)O—, —OP(S)(OR⁷)O—, —OP(O)(SR⁷)O—, —OP(O)(OR⁷)S—, —OP(O)(O⁻)O—, —SP(O)(O⁻) O—, —OP(S)(O)O—, —OP(O)(S⁻)O—, —OP(O)(O⁻)S—, —OP(O)(OR⁷)NR⁷—, —OP(O)(N(R⁷)₂)NR⁷—, —OP(OR⁷)O—, —OP(N(R⁷)₂)O—, —OP(OR⁷)N(R⁷)—, and —OPN(R⁷)₂NR⁷—;
[0112] each R₂ is independently selected from:
   [0113] C₁₋₆ alkyl optionally substituted with one or more substituents independently selected from halogen, —OR⁷, —SR⁷, —N(R⁷), —C(O)R⁷, —C(O)N(R⁷), —N(R⁷)C(O)R⁷, —N(R⁷)C(O)N(R⁷), —OC(O)N(R⁷)₂, —N(R⁷)C(O)OR⁷, —C(O)OR⁷, —OC(O)R⁷, and —S(O)R⁷;
[0114] R³ and R⁴ are each independently selected from:
   [0115] —OR⁷, —SR⁷, —N(R⁷)₂, —C(O)R⁷, —C(O)N(R⁷)₂, —N(R⁷)C(O)R⁷, —N(R⁷)C(O)N(R⁷)₂, —
   [0116] OC(O)N(R⁷)₂, —N(R⁷)C(O)OR⁷, —C(O)OR⁷, —OC(O)R⁷, and —S(O)R⁷:
[0117] each R⁵ is independently selected from:
   [0118] —OC(O)R⁷, —OC(O)N(R⁷)₂, —N(R⁷)C(O)R⁷—N(R⁷)C(O)N(R⁷)₂, —N(R⁷)C(O)OR⁷, —C(O)R⁷, —C(O)OR⁷, and —C(O)N(R⁷)₂;
[0119] each R⁶ is independently selected from:
   [0120] hydrogen;
   [0121] halogen, —CN, —NO₂, —OR⁷, —SR⁷, —N(R⁷), —C(O)R⁷, —C(O)N(R⁷), —N(R⁷)C(O)R⁷, —N(R⁷)C(O)N(R⁷)₂, —OC(O)N(R⁷)₂, —N(R⁷)C(O)OR⁷, —C(O)OR⁷, —OC(O)R⁷, and —S(O)R⁷; and
   [0122] C₁₋₆ alkyl optionally substituted with one or more substituents independently selected from halogen, —CN, —NO₂, —OR⁷, —SR⁷, —N(R⁷)₂, —C(O)R⁷, —C(O)N(R⁷)₂, —N(R⁷)C(O)R⁷, —N(R⁷)C(O)N(R⁷)₂, —OC(O)N(R⁷)₂, —N(R⁷)C(O)OR⁷, —C(O)OR⁷, —OC(O)R⁷, and —S(O)R⁷;
[0123] each R⁷ is independently selected from:
[0124] hydrogen;
[0125] C₁₋₆ alkyl, C₂₋₆ alkenyl, and C₂₋₆ alkynyl, each of which is optionally substituted with one or more substituents independently selected from halogen, —CN, —OH, —SH, —NO₂, —NH₂, ═O, ═S, —O—C₁₋₆ alkyl, —S—C₁₋₆ alkyl, —N(C₁₋₆ alkyl)₂, —NH(C₁₋₆ alkyl), C₃₋₁₀ carbocycle, and 3- to 10-membered heterocycle; and
[0126] C₃₋₁₀ carbocycle, and 3- to 10-membered heterocycle, each of which is optionally substituted with one or more substituents independently selected from halogen, —CN, —OH. —SH, —NO₂, —NH₂, —O, ═S, —O—C₁₋₆ alkyl, —S—C₁₋₆ alkyl, —N(C₁₋₆ alkyl)₂, —NH(C₁₋₆ alkyl), C₁₋₆ alkyl, C₂₋₆ alkenyl, C₂₋₆ alkynyl, C₃₋₁₀carbocycle, 3- to 10-membered heterocycle, and C₁₋₆ haloalkyl.

[0127] In some embodiments, each w is independently selected from any value from 1 to 10. In some embodiments, each w is independently selected from any value from 1 to 5. In some embodiments, each w is 1. In some embodiments, each v is independently selected from any value from 1 to 10. In some embodiments, each v is independently selected from any value from 1 to 5. In some embodiments, each v is 1. In some embodiments, n is selected from any value from 1 to 10. In some embodiments, n is selected from any value from 1 to 5. In some embodiments, n is 2. In some embodiments, m is selected from any value from 1 to 10. In some embodiments, m is selected from any value from 1 to 5. In some embodiments, m is selected from 1 and 2. In some embodiments, z is 3 and Y is C. In some embodiments, Q is selected from C₅₋₆ carbocycle optionally substituted with one or more substituents independently selected from halogen, —CN, —NO₂, —OR⁷, —SR⁷, —N(R⁷)₂, —C(O)R⁷, —C(O)N(R⁷)₂, —N(R⁷)C(O)R⁷, —N(R⁷)C(O)N(R⁷)₂, —OC(O)N(R⁷)₂, —N(R⁷)C(O)OR⁷, —C(O)OR⁷, —OC(O)R⁷, and —S(O)R⁷. In some embodiments, Q is selected from C₅₋₆ carbocycle optionally substituted with one or more substituents independently selected from halogen, —CN, —OH, —SH, —NO₂, and —NH₂. In some embodiments, Q is selected from phenyl and cyclohexyl, each of which is optionally substituted with one or more substituents independently selected from halogen, —CN, —OH, —SH, —NO₂, and —NH₂. In some embodiments, Q is selected from phenyl. In some embodiments, Q is selected from cyclohexyl. In some embodiments, R¹ is selected from—OP(O)(OR⁷)O—, —SP(O)(OR⁷)O—, —OP(S)(OR⁷)O—, —OP(O)(SR⁷)O—, —OP(O)(OR⁷)S—, —OP(O)(O⁻)O—, —SP(O)(O⁻)O—, —OP(S)(O⁻)O—, —OP(O)(S⁻)O—, —OP(O)(O⁻)S—, —OP(O)(OR⁷)NR⁷—, —OP(O)(N(R⁷)₂)NR⁷, —OP(OR⁷)O—, —OP(N(R⁷)₂)O—, —OP(OR⁷)N(R⁷)—, and —OPN(R⁷), NR⁷. In some embodiments, R¹ is selected from—OP(O)(OR⁷)O—, —SP(O)(OR⁷)O—, —OP(S)(OR⁷)O—, —OP(O)(SR⁷)O—, —OP(O)(OR⁷)S—, —OP(O)(O⁻)O—, —SP(O)(O)O—, —OP(S)(O⁻)O—, —OP(O)(S⁻)O—, —OP(O)(O⁻)S—, and —OP(OR⁷)O—. In some embodiments, R¹ is selected from—OP(O)(OR⁷)O—, —OP(S)(OR⁷)O—, —OP(O)(O⁻)O—, —OP(S)(O⁻)O—, —OP(O)(S⁻)O—, and —OP(OR⁷)O—. In some embodiments, R¹ is selected from—OP(O)(OR⁷)O— and —OP(OR⁷)O—. In some embodiments, R² is selected from C₁₋₃ alkyl substituted with one or more substituents independently selected from halogen, —OR⁷, —OC(O)R⁷, —SR⁷, —N(R⁷), —C(O)R⁷, and —S(O)R⁷. In some embodiments, R² is selected from C₁₋₃ alkyl substituted with one or more substituents independently selected from—OR⁷, —OC(O)R⁷, —SR⁷, and —N(R⁷)₂. In some embodiments, R² is selected from C₁₋₃ alkyl substituted with one or more substituents independently selected from—OR⁷ and —OC(O)R⁷. In some embodiments, R³ is selected from halogen, —OR⁷, —SR⁷, —N(R⁷)₂, —C(O)R⁷, —OC(O)R⁷, and —S(O)R⁷. In some embodiments, R³ is selected from—OR⁷—SR⁷, —OC(O)R⁷, and —N(R⁷)₂. In some embodiments, R³ is selected from —OR⁷— and —OC(O)R⁷. In some embodiments, R⁴ is selected from halogen, —OR⁷, —SR⁷, —N(R⁷)₂, —C(O)R⁷, —OC(O)R⁷, and —S(O)R⁷. In some embodiments, R⁴ is selected from—OR⁷—SR⁷, —OC(O)R⁷, and —N(R⁷)₂. In some embodiments, R⁴ is selected from—OR⁷— and —OC(O)R⁷. In some embodiments, R⁵ is selected from—OC(O)R⁷, —OC(O)N(R⁷)₂, —N(R⁷)C(O)R⁷—N(R⁷)C(O)N(R⁷)₂, and —N(R⁷)C(O)OR⁷. In some embodiments, R⁵ is selected from—OC(O)R⁷ and —N(R⁷)C(O)R⁷. In some embodiments, each R⁷ is independently selected from: hydrogen; and C₁₋₆ alkyl optionally substituted with one or more substituents independently selected from halogen, —CN, —OH, —SH, —NO₂, —NH₂, ═O, ═S, —O—C₁₋₆ alkyl, —S—C₁₋₆ alkyl, —N(C₁₋₆ alkyl)₂, —NH(C₁₋₆ alkyl), C₃₋₁₀ carbocycle, or 3- to 10-membered heterocycle. In some embodiments, each R⁷ is independently selected from C₁₋₆ alkyl optionally substituted with one or more substituents independently selected from halogen, —CN, —OH, —SH, —NO₂, —NH₂, ═O, ═S, —O—C₁₋₆ alkyl, —S—C₁₋₆ alkyl, —N(C₁₋₆ alkyl)₂, and —NH(C₁₋₆ alkyl). In some embodiments, each R⁷ is independently selected from C₁₋₆ alkyl optionally substituted with one or more substituents independently selected from halogen, —CN, —OH, and —SH. In some embodiments, w is 1; v is 1; n is 2; m is 1 or 2; z is 3 and Y is C; Q is phenyl or cyclohexyl, each of which is optionally substituted with one or more substituents independently selected from halogen, —CN, —OH, —SH, —NO₂, —NH₂, and C₁₋₃ alkyl; R¹ is selected from—OP(O)(OR⁷)O—, —OP(S)(OR⁷)O—, —OP(O)(O⁻)O—, —OP(S)(O⁻) O—, —OP(O)(S⁻)O—, and —OP(OR⁷)O—; R² is C₁ alkyl substituted with—OH or—OC(O)CH₃; R³ is —OH or—OC(O)CH₃; R⁴ is —OH or —OC(O)CH₃; and R⁵ is —NH(O)CH₃. In some embodiments, the compound comprises:

[chemical structure]

[chemical structure]

[chemical structure]

[chemical structure]

[chemical structure]

[chemical structure]

[chemical structure]

[chemical structure]

[chemical structure]

[chemical structure]

[chemical structure]

[chemical structure]

[chemical structure]

[chemical structure]

[0128] In some embodiments, the oligonucleotide (J) is attached at a 5′ end or a 3′ end of the oligonucleotide. In some embodiments, the oligonucleotide comprises DNA. In some embodiments, the oligonucleotide comprises RNA. In some embodiments, the oligonucleotide comprises one or more modified internucleoside linkages. In some embodiments, the one or more modified internucleoside linkages comprise alkylphosphonate, phosphorothioate, methylphosphonate, phosphorodithioate, alkylphosphonothioate, phosphoramidate, carbamate, carbonate, phosphate triester, acetamidate, or carboxymethyl ester, or a combination thereof. In some embodiments, the oligonucleotide comprises 1, 2, 3, 4, 5, 6, 7, 8, 9, 10, 11, 12, 13, 14, 15, 16, 17, 18, 19, or 20 modified internucleoside linkages. In some embodiments, the compound binds to an asialoglycoprotein receptor. In some embodiments, the compound targets a hepatocyte.

[0129] Some embodiments include the following, where J is the oligonucleotide:

[chemical structure]

J may include one or more additional phosphates, or one or more phosphorothioates linking to the oligonucleotide. J may include one or more additional phosphates linking to the oligonucleotide. J may include one or more phosphorothioates linking to the oligonucleotide.

[0130] Some embodiments include the following, where J is the oligonucleotide:

[chemical structure]

J may include one or more additional phosphates, or one or more phosphorothioates linking to the oligonucleotide. J may include one or more additional phosphates linking to the oligonucleotide. J may include one or more phosphorothioates linking to the oligonucleotide.

[0131] Some embodiments include the following, where J is the oligonucleotide:

[chemical structure]

J may include one or more phosphates or phosphorothioates linking to the oligonucleotide. J may include one or more phosphates linking to the oligonucleotide. J may include a phosphate linking to the oligonucleotide. J may include one or more phosphorothioates linking to the oligonucleotide. J may include a phosphorothioate linking to the oligonucleotide.

[0132] Some embodiments include the following, where J is the oligonucleotide:

[chemical structure]

The structure in this compound attached to the oligonucleotide (J) may be referred to as “ETL17,” and is an example of a GalNAc moiety. J may include one or more phosphates or phosphorothioates linking to the oligonucleotide. J may include one or more phosphates linking to the oligonucleotide. J may include a phosphate linking to the oligonucleotide. J may include one or more phosphorothioates linking to the oligonucleotide. J may include a phosphorothioate linking to the oligonucleotide.

[0133] Some embodiments include the following, where the phosphate or “5′” indicates a connection to the oligonucleotide:

[chemical structure]

[0134] Some embodiments include the following, where the phosphate or “5” indicates a connection to the oligonucleotide:

[chemical structure]

[0135] Some embodiments include the following, where J is the oligonucleotide:

[chemical structure]

include one or more phosphates or phosphorothioates linking to the oligonucleotide. J may include one or more phosphates linking to the oligonucleotide. J may include a phosphate linking to the oligonucleotide. J may include one or more phosphorothioates linking to the oligonucleotide. J may include a phosphorothioate linking to the oligonucleotide.

[0136] Some embodiments include the following, where J is the oligonucleotide:

[chemical structure]

The structure in this compound attached to the oligonucleotide (J) may be referred to as “ETL1,” and is an example of a GalNAc moiety. J may include one or more phosphates or phosphorothioates linking to the oligonucleotide. J may include one or more phosphates linking to the oligonucleotide. J may include a phosphate linking to the oligonucleotide. J may include one or more phosphorothioates linking to the oligonucleotide. J may include a phosphorothioate linking to the oligonucleotide.
3. siRNA Modification Patterns

[0137] In some embodiments, the composition comprises an oligonucleotide that inhibits the expression of PLIN1, wherein the oligonucleotide comprises an siRNA comprising a sense strand and an antisense strand, wherein the sense strand comprises modification pattern 1S:
[0138] 5′-NfsnsNfnNfnNfNfNfnNfnNfnNfnNfnNfsnsn-3′ (SEQ ID NO: 6015), wherein “Nf” is a 2′ fluoro-modified nucleoside. “n” is a 2′ O-methyl modified nucleoside, and “s” is a phosphorothioate linkage. In some embodiments, the sense strand comprises modification pattern 2S:
[0139] 5′-nsnsnnNfnNfNfNfnnnnnnnnnnsnsn-3′ (SEQ ID NO: 6016), wherein “Nf is a 2” fluoro-modified nucleoside. “n” is a 2′ O-methyl modified nucleoside, and “s” is a phosphorothioate linkage. In some embodiments, the sense strand comprises modification pattern 3S:
[0140] 5′-nsnsnnNfnNfnNfnnnnnnnnnnsnsn-3″ (SEQ ID NO: 6017), wherein “Nf” is a 2′ fluoro-modified nucleoside. “n” is a 2′ O-methyl modified nucleoside, and “s” is a phosphorothioate linkage. In some embodiments, the sense strand comprises modification pattern 4S:
[0141] 5′-NfsnsNfnNfnNfNfNfnNfnNfnNfnNfnNfsnsnN-moiety-3″ (SEQ ID NO: 6018), wherein “Nf” is a 2′ fluoro-modified nucleoside. “n” is a 2′ O-methyl modified nucleoside. “s” is a phosphorothioate linkage, and N comprises one or more nucleosides. In some embodiments, the sense strand comprises modification pattern 5S: 5″-nsnsnnNfnNfNfNfnnnnnnnnnnsnsnN-moiety-3″ (SEQ ID NO: 6019), wherein “Nf” is a 2′ fluoro-modified nucleoside. “n” is a 2′ O-methyl modified nucleoside. “s” is a phosphorothioate linkage, and N comprises one or more nucleosides. In some embodiments, the moiety in modification pattern 4S or 5S is a lipid moiety. In some embodiments, the moiety in modification pattern 4S or 5S is a sugar moiety. In some embodiments, the sense strand comprises modification pattern 6S: 5′-NfsnsNfnNfnNfnNfnNfnNfnNfnNfnNfsnsn-3″ (SEQ ID NO: 6020), wherein “Nf” is a 2′ fluoro-modified nucleoside. “n” is a 2′ O-methyl modified nucleoside, and “s” is a phosphorothioate linkage. In some embodiments, the sense strand comprises modification pattern 7S: 5′-nsnsnnNfNfNfNfNfnnnnnnnnnnsnsn-3″ (SEQ ID NO: 6021), wherein “Nf” is a 2′ fluoro-modified nucleoside. “n” is a 2′ O-methyl modified nucleoside, and “s” is a phosphorothioate linkage. In some embodiments, the sense strand comprises modification pattern 8S:
[0142] 5″-nsnsnnnNfNfNfNfnnnnnnnnnnsnsn-3′ (SEQ ID NO: 6022), wherein “Nf” is a 2′ fluoro-modified nucleoside. “n” is a 2′ O-methyl modified nucleoside, and “s” is a phosphorothioate linkage. In some embodiments, the sense strand comprises modification pattern 9S:
[0143] 5′-nsnsnnnnNfNfNfNfnnnnnnnnnsnsn-3′ (SEQ ID NO: 6023), wherein “Nf” is a 2′ fluoro-modified nucleoside. “n” is a 2′ O-methyl modified nucleoside, and “s” is a phosphorothioate linkage. In some embodiments, the sense strand comprises modification pattern 10S:
[0144] 5-NfsnNfnNfnNfNfNfnNfnNfnNfnNfnNfsnsn-3″ (SEQ ID NO: 6024), wherein “Nf” is a 2′ fluoro-modified nucleoside. “n” is a 2′ O-methyl modified nucleoside, and “s” is a phosphorothioate linkage. In some embodiments, the sense strand comprises modification pattern 11S:
[0145] 5′-NfsnNfnNfnNfnNfnNfnNfnNfnNfnNfsnsn-3″ (SEQ ID NO: 6025), wherein “Nf” is a 2′ fluoro-modified nucleoside. “n” is a 2′ O-methyl modified nucleoside, and “s” is a phosphorothioate linkage. In some embodiments, the sense strand comprises modification pattern 12S:
[0146] 5-NfnNfnNfnNfnNfnNfnNfnNfnNfnNfsnsn-3′ (SEQ ID NO: 6026), wherein “Nf” is a 2′ fluoro-modified nucleoside. “n” is a 2′ O-methyl modified nucleoside, and “s” is a phosphorothioate linkage. In some embodiments, the sense strand comprises modification pattern 13S:
[0147] 5′-nnnnnnNfnNfnnnnnnnnnnsnsn-3′ (SEQ ID NO: 6027), wherein “Nf” is a 2′ fluoro-modified nucleoside. “n” is a 2′ O-methyl modified nucleoside, and “s” is a phosphorothioate linkage. In some embodiments, the sense strand comprises modification pattern 14S:
[0148] 5′-nnnnnnnNfNfNfNfnnnnnnnnsnsn-3′ (SEQ ID NO: 6028), wherein “Nf” is a 2′ fluoro-modified nucleoside. “n” is a 2′ O-methyl modified nucleoside, and “s” is a phosphorothioate linkage. In some embodiments, the sense strand comprises modification pattern 15S:
[0149] 5′-nnnnNfnnnNfnNfnnnnnnnnsnsn-3″ (SEQ ID NO: 6029), wherein “Nf” is a 2′ fluoro-modified nucleoside. “n” is a 2′ O-methyl modified nucleoside, and “s” is a phosphorothioate linkage. In some embodiments, the sense strand comprises modification pattern 16S:
[0150] 5′-nnnnnnnNfNfnNfnnnnnnnnsnsn-3″ (SEQ ID NO: 6030), wherein “Nf” is a 2′ fluoro-modified nucleoside. “n” is a 2′ O-methyl modified nucleoside, and “s” is a phosphorothioate linkage. In some embodiments, the sense strand comprises modification pattern 17S:
[0151] 5′-nnnnnnNfNfNfNfNfnnnnnnnnsnsn-3″ (SEQ ID NO: 6031), wherein “Nf” is a 2′ fluoro-modified nucleoside. “n” is a 2′ O-methyl modified nucleoside, and “s” is a phosphorothioate linkage. In some embodiments, the sense strand comprises modification pattern 18S:
[0152] 5′-nnnnNfnNfNfNfNfnnnnnnnnnsnsn-3″ (SEQ ID NO: 6032), wherein “Nf is a 2” fluoro-modified nucleoside. “n” is a 2′ O-methyl modified nucleoside, and “s” is a phosphorothioate linkage. In some embodiments, the sense strand comprises modification pattern 19S:
[0153] 5′-nnnnnNfNfNfNfnNfnnnnnnnnsnsn-3′ (SEQ ID NO: 6033), wherein “Nf” is a 2′ fluoro-modified nucleoside. “n” is a 2′ O-methyl modified nucleoside, and “s” is a phosphorothioate linkage. In some embodiments, the sense strand comprises modification pattern 20S:
[0154] 5′-nnnnnNfNfNfNfnnnnnnnnnnsnsn-3′ (SEQ ID NO: 6034), wherein “Nf” is a 2′ fluoro-modified nucleoside. “n” is a 2′ O-methyl modified nucleoside, and “s” is a phosphorothioate linkage. In some embodiments, the sense strand comprises modification pattern 21S:
[0155] 5′-nnnnNfNfNfNfNfnnnnnnnnnnsnsn-3′ (SEQ ID NO: 6035), wherein “Nf” is a 2′ fluoro-modified nucleoside. “n” is a 2′ O-methyl modified nucleoside, and “s” is a phosphorothioate linkage. In some embodiments, the sense strand comprises modification pattern 22S:
[0156] 5′-nnnnnnnnNfNfnnnnnnnnnsnsn-3′ (SEQ ID NO: 6036), wherein “Nf” is a 2′ fluoro-modified nucleoside. “n” is a 2′ O-methyl modified nucleoside, and “s” is a phosphorothioate linkage. In some embodiments, the sense strand comprises modification pattern 23S:
[0157] 5′-nnnnnnNfNfNfNfnnnnnnnnnsnsn-3′ (SEQ ID NO: 6037), wherein “Nf” is a 2′ fluoro-modified nucleoside. “n” is a 2′ O-methyl modified nucleoside, and “s” is a phosphorothioate linkage. In some embodiments, the sense strand comprises modification pattern 24S:
[0158] 5′-nnnnNfNfnnNfnNfnnnnnnnnsnsn-3″ (SEQ ID NO: 6038), wherein “Nf” is a 2′ fluoro-modified nucleoside. “n” is a 2′ O-methyl modified nucleoside, and “s” is a phosphorothioate linkage. In some embodiments, the sense strand comprises modification pattern 25S:
[0159] 5′-nnnnNfnNfnNfnNfnnnnnnnnsnsn-3′ (SEQ ID NO: 6039), wherein “Nf” is a 2′ fluoro-modified nucleoside. “n” is a 2′ O-methyl modified nucleoside, and “s” is a phosphorothioate linkage. In some embodiments, the sense strand comprises modification pattern 26S:
[0160] 5′-nnnnnNfnnNfnNfnnnnnnnnsnsn-3′ (SEQ ID NO: 6040), wherein “Nf” is a 2′ fluoro-modified nucleoside. “n” is a 2′ O-methyl modified nucleoside, and “s” is a phosphorothioate linkage. In some embodiments, the sense strand comprises modification pattern 27S:
[0161] 5′-nnnnnNfNfnNfnnnnnnnnnnsnsn-3′ (SEQ ID NO: 6041), wherein “Nf is a 2” fluoro-modified nucleoside. “n” is a 2′ O-methyl modified nucleoside, and “s” is a phosphorothioate linkage. In some embodiments, the sense strand comprises modification pattern 28S:
[0162] 5″-nnnnnnNfnNfNfnnnnnnnnnsnsn-3″ (SEQ ID NO: 6042), wherein “Nf” is a 2′ fluoro-modified nucleoside. “n” is a 2′ O-methyl modified nucleoside, and “s” is a phosphorothioate linkage. In some embodiments, the sense strand comprises modification pattern 29S:
[0163] 5′-nNfnNfnNfnNfNfnnnnnNfnNfNfnsnsn-3′ (SEQ ID NO: 6043), wherein “Nf” is a 2′ fluoro-modified nucleoside. “n” is a 2′ O-methyl modified nucleoside, and “s” is a phosphorothioate linkage. In some embodiments, the sense strand comprises modification pattern 30S:
[0164] 5′-snnnnnNfNfNfNfnNfnnnnnnnnsnsn-3′ (SEQ ID NO: 6044), wherein “Nf” is a 2′ fluoro-modified nucleoside. “n” is a 2′ O-methyl modified nucleoside, and “s” is a phosphorothioate linkage. In some embodiments, the sense strand comprises modification pattern 31S:
[0165] 5′-snnnnnNfNfNfNfnnnnnnnnnnsnsn-3′ (SEQ ID NO: 6045), wherein “Nf” is a 2′ fluoro-modified nucleoside. “n” is a 2′ O-methyl modified nucleoside, and “s” is a phosphorothioate linkage. In some embodiments, the sense strand comprises modification pattern 32S:
[0166] 5″-snnnnNfNfNfNfNfnnnnnnnnnnsnsn-3′ (SEQ ID NO: 6046), wherein “Nf” is a 2′ fluoro-modified nucleoside. “n” is a 2′ O-methyl modified nucleoside, and “s” is a phosphorothioate linkage. In some embodiments, the sense strand comprises modification pattern 33S:
[0167] 5′-snnnnnnnnNfNfnnnnnnnnnsnsn-3″ (SEQ ID NO: 6047), wherein “Nf” is a 2′ fluoro-modified nucleoside. “n” is a 2′ O-methyl modified nucleoside, and “s” is a phosphorothioate linkage. In some embodiments, the sense strand comprises modification pattern 34S:
[0168] 5′-snnnnNfNfnnNfnNfnnnnnnnnsnsn-3″ (SEQ ID NO: 6048), wherein “Nf” is a 2′ fluoro-modified nucleoside. “n” is a 2′ O-methyl modified nucleoside, and “s” is a phosphorothioate linkage. In some embodiments, the sense strand comprises modification pattern 35S:
[0169] 5′-snNfnNfnNfnNfNfnnnnnNfnNfNfnsnsn-3′ (SEQ ID NO: 6049), wherein “Nf” is a 2′ fluoro-modified nucleoside. “n” is a 2′ O-methyl modified nucleoside, and “s” is a phosphorothioate linkage. In some embodiments, the sense strand comprises modification pattern 36S:
[0170] 5′-nnnnnNfnNfNfnnnnnnnnnnsnsn-3′ (SEQ ID NO: 6050), wherein “Nf is a 2” fluoro-modified nucleoside. “n” is a 2′ O-methyl modified nucleoside, and “s” is a phosphorothioate linkage. In some embodiments, the sense strand comprises modification pattern 37S:
[0171] 5′-nnnnNfnnNfNfnnnnnnnnnnsnsn-3′ (SEQ ID NO: 6051), wherein “Nf” is a 2′ fluoro-modified nucleoside. “n” is a 2′ O-methyl modified nucleoside, and “s” is a phosphorothioate linkage. In some embodiments, the sense strand comprises modification pattern 38S:
[0172] 5′-nnnnNfnNfnNfnnnnnnnnnnsnsn-3′ (SEQ ID NO: 6052), wherein “Nf” is a 2′ fluoro-modified nucleoside. “n” is a 2′ O-methyl modified nucleoside, and “s” is a phosphorothioate linkage. In some embodiments, the sense strand comprises modification pattern 39S:
[0173] 5′-nnnnNfNfnnNfnnnnnnnnnnsnsn-3′ (SEQ ID NO: 6053), wherein “Nf” is a 2′ fluoro-modified nucleoside. “n” is a 2′ O-methyl modified nucleoside, and “s” is a phosphorothioate linkage. In some embodiments, the sense strand comprises modification pattern 40S:
[0174] 5′-nnnnNfNfnNfNfnnnnnnnnnnsnsn-3′ (SEQ ID NO: 6054), wherein “Nf” is a 2′ fluoro-modified nucleoside. “n” is a 2′ O-methyl modified nucleoside, and “s” is a phosphorothioate linkage. In some embodiments, the sense strand comprises modification pattern 41:
[0175] 5′-snnnnNfNfnNfNfnnnnnnnnnnsnsn-3″ (SEQ ID NO: 6055), wherein “Nf” is a 2′ fluoro-modified nucleoside. “n” is a 2′ O-methyl modified nucleoside, and “s” is a phosphorothioate linkage. In some embodiments, the sense strand comprises modification pattern 42S:
[0176] 5′-snnnnNfNfnnNfNfnnnnnnnnnsnsn-3″ (SEQ ID NO: 6056), wherein “Nf” is a 2′ fluoro-modified nucleoside. “n” is a 2′ O-methyl modified nucleoside, and “s” is a phosphorothioate linkage. In some embodiments, the sense strand comprises modification pattern 43S:
[0177] 5-snnnnNfnNfnNfnnnnnnnnnnsnsn-3″ (SEQ ID NO: 6057), wherein “Nf” is a 2′ fluoro-modified nucleoside. “n” is a 2′ O-methyl modified nucleoside, and “s” is a phosphorothioate linkage. In some embodiments, the sense strand comprises modification pattern 44S:
[0178] 5′-snnnnnnnnNfnNfnnnnnnnnsnsn-3′ (SEQ ID NO: 6058), wherein “Nf” is a 2′ fluoro-modified nucleoside. “n” is a 2′ O-methyl modified nucleoside, and “s” is a phosphorothioate linkage. In some embodiments, the sense strand comprises modification pattern 45S:
[0179] 5′-snnnnnNfNfNfNfnNfnnnnnnnnsnsn-3′ (SEQ ID NO: 6059), wherein “Nf” is a 2′ fluoro-modified nucleoside. “n” is a 2′ O-methyl modified nucleoside, and “s” is a phosphorothioate linkage. In some embodiments, the sense strand comprises modification pattern 46S:
[0180] 5′-snnnnnnNfnNfnNfnnnnnnnnsnsn-3′ (SEQ ID NO: 6060), wherein “Nf” is a 2′ fluoro-modified nucleoside. “n” is a 2′ O-methyl modified nucleoside, and “s” is a phosphorothioate linkage. In some embodiments, the sense strand comprises modification pattern 47S:
[0181] 5′-snnnnNfnNfnNfnNfnnnnnnnnsnsn-3″ (SEQ ID NO: 6061), wherein “Nf” is a 2′ fluoro-modified nucleoside. “n” is a 2′ O-methyl modified nucleoside, and “s” is a phosphorothioate linkage. In some embodiments, the sense strand comprises modification pattern 48S:
[0182] 5′-snnnnnnnnNfNfnnnnnnnnnsnsn-3′ (SEQ ID NO: 6062), wherein “Nf” is a 2′ fluoro-modified nucleoside. “n” is a 2′ O-methyl modified nucleoside, and “s” is a phosphorothioate linkage. In some embodiments, the sense strand comprises modification pattern 49S:
[0183] 5″-snnnnNfnnNfNfnNfnnnnnnnnsnsn-3′ (SEQ ID NO: 6063), wherein “Nf” is a 2′ fluoro-modified nucleoside. “n” is a 2′ O-methyl modified nucleoside, and “s” is a phosphorothioate linkage. In some embodiments, the sense strand comprises modification pattern 50S:
[0184] 5-snnnnnNfNfnNfnNfnnnnnnnnsnsn-3′ (SEQ ID NO: 6064), wherein “Nf is a 2” fluoro-modified nucleoside. “n” is a 2′ O-methyl modified nucleoside, and “s” is a phosphorothioate linkage.

[0185] In some embodiments, the composition comprises an oligonucleotide that inhibits the expression of PLIN1, wherein the oligonucleotide comprises an siRNA comprising a sense strand and an antisense strand, wherein the antisense strand comprises modification pattern 1AS:
[0186] 5″-nsNfsnNfnNfnNfnNfnnnNfnNfnNfnsnsn-3′ (SEQ ID NO: 6065), wherein “Nf is a 2” fluoro-modified nucleoside. “n” is a 2′ O-methyl modified nucleoside, and “s” is a phosphorothioate linkage. In some embodiments, the antisense strand comprises modification pattern 2AS:
[0187] 5′-nsNfsnnnNfnNfNfnnnnNfnNfinnsnsn-3″ (SEQ ID NO: 6066), wherein “Nf” is a 2′ fluoro-modified nucleoside. “n” is a 2′ O-methyl modified nucleoside, and “s” is a phosphorothioate linkage. In some embodiments, the antisense strand comprises modification pattern 3AS:
[0188] 5′-nsNfsnnnNfnnnnnnnNfnNfnnnsnsn-3′ (SEQ ID NO: 6067), wherein “Nf” is a 2′ fluoro-modified nucleoside. “n” is a 2′ O-methyl modified nucleoside, and “s” is a phosphorothioate linkage. In some embodiments, the antisense strand comprises modification pattern 4AS:
[0189] 5′-nsNfsnNfnNfnnnnnnnNfnNfnnnsnsn-3″ (SEQ ID NO: 6068), wherein “Nf is a 2” fluoro-modified nucleoside. “n” is a 2′ O-methyl modified nucleoside, and “s” is a phosphorothioate linkage. In some embodiments, the antisense strand comprises modification pattern 5AS:
[0190] 5″-nsNfsnnnnnnnnnnnNfnNfnnnsnsn-3″ (SEQ ID NO: 6069), wherein “Nf” is a 2′ fluoro-modified nucleoside. “n” is a 2′ O-methyl modified nucleoside, and “s” is a phosphorothioate linkage. In some embodiments, the antisense strand comprises modification pattern 6AS:
[0191] 5″-nsNfsnnnNfnnNfnnnnNfnNfnnnsnsn-3″ (SEQ ID NO: 6070), wherein “Nf” is a 2′ fluoro-modified nucleoside. “n” is a 2′ O-methyl modified nucleoside, and “s” is a phosphorothioate linkage. In some embodiments, the antisense strand comprises modification pattern 7AS:
[0192] 5′-nsNfsnNfnNfnNfnNfnNfnNfnNfnNfnsnsn-3′ (SEQ ID NO: 6071), wherein “Nf” is a 2′ fluoro-modified nucleoside. “n” is a 2′ O-methyl modified nucleoside, and “s” is a phosphorothioate linkage. In some embodiments, the antisense strand comprises modification pattern 8AS:
[0193] 5″-nsNfsnnnnnnnnnnnNfnnnnnsnsn-3′ (SEQ ID NO: 6072), wherein “Nf” is a 2′ fluoro-modified nucleoside. “n” is a 2′ O-methyl modified nucleoside, and “s” is a phosphorothioate linkage. In some embodiments, the antisense strand comprises modification pattern 9AS:
[0194] 5′-5 VpnsNfsnNfnNfnNfnNfnNfnNfnNfnNfnsnsn-3″ (SEQ ID NO: 6073), wherein “Nf” is a 2′ fluoro-modified nucleoside. “n” is a 2′ O-methyl modified nucleoside. “s” is a phosphorothioate linkage, and “5Vp” is a 5′ vinylphosphonate. In some embodiments, the antisense strand comprises modification pattern 10AS: 5′-nsnsnNfnNfnNfnNfnNfnNfnNfnNfnsnsn-3′ (SEQ ID NO: 6075), wherein “Nf” is a 2′ fluoro-modified nucleoside. “n” is a 2′ O-methyl modified nucleoside, and “s” is a phosphorothioate linkage.

[0195] In some embodiments, the composition comprises an oligonucleotide that inhibits the expression of PLIN1, wherein the oligonucleotide comprises an siRNA comprising a sense strand and an antisense strand, wherein the sense strand comprises pattern 1S and the antisense strand comprises pattern 1AS, 2AS, 3AS, 4AS, 5AS, 6AS, 7AS, 8AS, 9AS or 10AS. In some embodiments, the sense strand comprises pattern 2S and the antisense strand comprises pattern 1AS, 2AS, 3AS, 4AS, 5AS. 6AS, 7AS, 8AS, 9AS or 10AS. In some embodiments, the sense strand comprises pattern 3S and the antisense strand comprises pattern 1AS, 2AS, 3AS, 4AS, 5AS, 6AS, 7AS, 8AS, 9AS or 10AS. In some embodiments, the sense strand comprises pattern 4S and the antisense strand comprises pattern 1AS, 2AS, 3AS, 4AS, 5AS, 6AS, 7AS, 8AS, 9AS or 10AS. In some embodiments, the sense strand comprises pattern 5S and the antisense strand comprises pattern 1AS, 2AS, 3AS, 4AS, 5AS, 6AS. 7AS, 8AS, 9AS or 10AS. In some embodiments, the sense strand comprises pattern 6S and the antisense strand comprises pattern 1AS, 2AS, 3AS, 4AS, 5AS, 6AS, 7AS, 8AS, 9AS or 10AS. In some embodiments, the sense strand comprises pattern 7S and the antisense strand comprises pattern 1AS, 2AS, 3AS, 4AS, 5AS, 6AS, 7AS, 8AS, 9AS or 10AS. In some embodiments, the sense strand comprises pattern 8S and the antisense strand comprises pattern 1AS, 2AS, 3AS, 4AS, 5AS, 6AS. 7AS, 8AS, 9AS or 10AS. In some embodiments, the sense strand comprises pattern 9S and the antisense strand comprises pattern 1AS, 2AS, 3AS, 4AS, 5AS, 6AS, 7AS, 8AS, 9AS or 10AS. In some embodiments, the sense strand comprises pattern 10S and the antisense strand comprises pattern 1AS, 2AS, 3AS, 4AS, 5AS, 6AS, 7AS, 8AS, 9AS or 10AS. In some embodiments, the sense strand comprises pattern 11S and the antisense strand comprises pattern 1AS, 2AS, 3AS, 4AS, 5AS, 6AS. 7AS, 8AS, 9AS or 10AS. In some embodiments, the sense strand comprises pattern 12S and the antisense strand comprises pattern 1AS, 2AS, 3AS, 4AS, 5AS, 6AS, 7AS, 8AS, 9AS or 10AS. In some embodiments, the sense strand comprises pattern 13S and the antisense strand comprises pattern 1AS, 2AS, 3AS, 4AS, 5AS, 6AS, 7AS, 8AS, 9AS or 10AS. In some embodiments, the sense strand comprises pattern 14S and the antisense strand comprises pattern 1AS, 2AS, 3AS, 4AS, 5AS, 6AS. 7AS, 8AS, 9AS or 10AS. In some embodiments, the sense strand comprises pattern 15S and the antisense strand comprises pattern 1AS, 2AS, 3AS, 4AS, 5AS, 6AS, 7AS, 8AS, 9AS or 10AS. In some embodiments, the sense strand comprises pattern 16S and the antisense strand comprises pattern 1AS, 2AS, 3AS, 4AS, 5AS, 6AS, 7AS, 8AS, 9AS or 10AS. In some embodiments, the sense strand comprises pattern 17S and the antisense strand comprises pattern 1AS, 2AS, 3AS, 4AS, 5AS, 6AS. 7AS, 8AS, 9AS or 10AS. In some embodiments, the sense strand comprises pattern 18S and the antisense strand comprises pattern 1AS, 2AS, 3AS, 4AS, 5AS, 6AS, 7AS, 8AS, 9AS or 10AS. In some embodiments, the sense strand comprises pattern 19S and the antisense strand comprises pattern 1AS, 2AS, 3AS, 4AS, 5AS, 6AS, 7AS, 8AS, 9AS or 10AS. In some embodiments, the sense strand comprises pattern 20S and the antisense strand comprises pattern 1AS, 2AS, 3AS, 4AS, 5AS, 6AS. 7AS, 8AS, 9AS or 10AS. In some embodiments, the sense strand comprises pattern 21S and the antisense strand comprises pattern 1AS, 2AS, 3AS, 4AS, 5AS, 6AS, 7AS, 8AS, 9AS or 10AS. In some embodiments, the sense strand comprises pattern 22S and the antisense strand comprises pattern 1AS, 2AS, 3AS, 4AS, 5AS, 6AS, 7AS, 8AS, 9AS or 10AS. In some embodiments, the sense strand comprises pattern 23S and the antisense strand comprises pattern 1AS, 2AS, 3AS, 4AS, 5AS, 6AS. 7AS, 8AS, 9AS or 10AS. In some embodiments, the sense strand comprises pattern 24S and the antisense strand comprises pattern 1AS, 2AS, 3AS, 4AS, 5AS, 6AS, 7AS, 8AS, 9AS or 10AS. In some embodiments, the sense strand comprises pattern 25S and the antisense strand comprises pattern 1AS, 2AS, 3AS, 4AS, 5AS, 6AS, 7AS, 8AS, 9AS or 10AS. In some embodiments, the sense strand comprises pattern 26S and the antisense strand comprises pattern 1AS, 2AS, 3AS, 4AS, 5AS, 6AS. 7AS, 8AS, 9AS or 10AS. In some embodiments, the sense strand comprises pattern 27S and the antisense strand comprises pattern 1AS, 2AS, 3AS, 4AS, 5AS, 6AS, 7AS, 8AS, 9AS or 10AS. In some embodiments, the sense strand comprises pattern 28S and the antisense strand comprises pattern 1AS, 2AS, 3AS, 4AS, 5AS, 6AS, 7AS, 8AS, 9AS or 10AS. In some embodiments, the sense strand comprises pattern 29S and the antisense strand comprises pattern 1AS, 2AS, 3AS, 4AS, 5AS, 6AS. 7AS, 8AS, 9AS or 10AS. In some embodiments, the sense strand comprises pattern 30S and the antisense strand comprises pattern 1AS, 2AS, 3AS, 4AS, 5AS, 6AS, 7AS, 8AS, 9AS or 10AS. In some embodiments, the sense strand comprises pattern 31S and the antisense strand comprises pattern 1AS, 2AS, 3AS, 4AS, 5AS, 6AS, 7AS, 8AS, 9AS or 10AS. In some embodiments, the sense strand comprises pattern 32S and the antisense strand comprises pattern 1AS, 2AS, 3AS, 4AS, 5AS, 6AS. 7AS, 8AS, 9AS or 10AS. In some embodiments, the sense strand comprises pattern 33S and the antisense strand comprises pattern 1AS, 2AS, 3AS, 4AS, 5AS, 6AS, 7AS, 8AS, 9AS or 10AS. In some embodiments, the sense strand comprises pattern 34S and the antisense strand comprises pattern 1AS, 2AS, 3AS, 4AS, 5AS, 6AS, 7AS, 8AS, 9AS or 10AS. In some embodiments, the sense strand comprises pattern 35S and the antisense strand comprises pattern 1AS, 2AS, 3AS, 4AS, 5AS, 6AS. 7AS, 8AS, 9AS or 10AS. In some embodiments, the sense strand comprises pattern 36S and the antisense strand comprises pattern 1AS, 2AS, 3AS, 4AS, 5AS, 6AS, 7AS, 8AS, 9AS or 10AS. In some embodiments, the sense strand comprises pattern 37S and the antisense strand comprises pattern 1AS, 2AS, 3AS, 4AS, 5AS, 6AS, 7AS, 8AS, 9AS or 10AS. In some embodiments, the sense strand comprises pattern 38S and the antisense strand comprises pattern 1AS, 2AS, 3AS, 4AS, 5AS, 6AS. 7AS, 8AS, 9AS or 10AS. In some embodiments, the sense strand comprises pattern 39S and the antisense strand comprises pattern 1AS, 2AS, 3AS, 4AS, 5AS, 6AS, 7AS, 8AS, 9AS or 10AS. In some embodiments, the sense strand comprises pattern 40S and the antisense strand comprises pattern 1AS, 2AS, 3AS, 4AS, 5AS, 6AS, 7AS, 8AS, 9AS or 10AS. In some embodiments, the sense strand comprises pattern 41S and the antisense strand comprises pattern 1AS, 2AS, 3AS, 4AS, 5AS, 6AS. 7AS, 8AS, 9AS or 10AS. In some embodiments, the sense strand comprises pattern 42S and the antisense strand comprises pattern 1AS, 2AS, 3AS, 4AS, 5AS, 6AS, 7AS, 8AS, 9AS or 10AS. In some embodiments, the sense strand comprises pattern 43S and the antisense strand comprises pattern 1AS, 2AS, 3AS, 4AS, 5AS, 6AS, 7AS, 8AS, 9AS or 10AS. In some embodiments, the sense strand comprises pattern 44S and the antisense strand comprises pattern 1AS, 2AS, 3AS, 4AS, 5AS, 6AS. 7AS, 8AS, 9AS or 10AS. In some embodiments, the sense strand comprises pattern 45S and the antisense strand comprises pattern 1AS, 2AS, 3AS, 4AS, 5AS, 6AS, 7AS, 8AS, 9AS or 10AS. In some embodiments, the sense strand comprises pattern 46S and the antisense strand comprises pattern 1AS, 2AS, 3AS, 4AS, 5AS, 6AS, 7AS, 8AS, 9AS or 10AS. In some embodiments, the sense strand comprises pattern 47S and the antisense strand comprises pattern 1AS, 2AS, 3AS, 4AS, 5AS, 6AS. 7AS, 8AS, 9AS or 10AS. In some embodiments, the sense strand comprises pattern 48S and the antisense strand comprises pattern 1AS, 2AS, 3AS, 4AS, 5AS, 6AS, 7AS, 8AS, 9AS or 10AS. In some embodiments, the sense strand comprises pattern 49S and the antisense strand comprises pattern 1AS, 2AS, 3AS, 4AS, 5AS, 6AS, 7AS, 8AS, 9AS or 10AS. In some embodiments, the sense strand comprises pattern 50S and the antisense strand comprises pattern 1AS, 2AS, 3AS, 4AS, 5AS, 6AS. 7AS, 8AS, 9AS or 10AS.

[0196] In some embodiments, the sense strand comprises pattern 1S, 2S, 3S, 4S, 5S, 6S, 7S, 8S, 9S. 10S, 11S, 12S, 13S, 14S, 15S, 16S, 17S, 18S, 19S, 20S, 21S, 22S, 23S, 24S, 25S, 26S, 27S, 28S. 29S, 30S, 31S, 32S, 33S, 34S, 35S, 36S, 37S, 38S, 39S, 40S, 41S, 42S, 43S, 44S, 45S, 46S, 47S, 48S. 49S, or 50S, and the antisense strand comprises pattern 1AS. In some embodiments, the sense strand comprises pattern 1S, 2S, 3S, 4S, 5S, 6S, 7S, 8S, 9S, 10S, 11S, 12S, 13S, 14S, 15S, 16S, 17S, 18S. 19S, 20S, 21S, 22S, 23S, 24S, 25S, 26S, 27S, 28S, 29S, 30S, 31S, 32S, 33S, 34S, 35S, 36S, 37S, 38S. 39S, 40S, 41S, 42S, 43S, 44S, 45S, 46S, 47S, 48S, 49S, or 50S, and the antisense strand comprises pattern 2AS. In some embodiments, the sense strand comprises pattern 1S, 2S, 3S, 4S, 5S, 6S, 7S, 8S. 9S, 10S, 11S, 12S, 13S, 14S, 15S, 16S, 17S, 18S, 19S, 20S, 21S, 22S, 23S, 24S, 25S, 26S, 27S, 28S. 29S, 30S, 31S, 32S, 33S, 34S, 35S, 36S, 37S, 38S, 39S, 40S, 41S, 42S, 43S, 44S, 45S, 46S, 47S, 48S. 49S, or 50S, and the antisense strand comprises pattern 3AS. In some embodiments, the sense strand comprises pattern 1S, 2S, 3S, 4S, 5S, 6S, 7S, 8S, 9S, 10S, 11S, 12S, 13S, 14S, 15S, 16S, 17S, 18S. 19S, 20S, 21S, 22S, 23S, 24S, 25S, 26S, 27S, 28S, 29S, 30S, 31S, 32S, 33S, 34S, 35S, 36S, 37S, 38S. 39S, 40S, 41S, 42S, 43S, 44S, 45S, 46S, 47S, 48S, 49S, or 50S, and the antisense strand comprises pattern 4AS. In some embodiments, the sense strand comprises pattern 1S, 2S, 3S, 4S, 5S, 6S, 7S, 8S. 9S, 10S, 11S, 12S, 13S, 14S, 15S, 16S, 17S, 18S, 19S, 20S, 21S, 22S, 23S, 24S, 25S, 26S, 27S, 28S. 29S, 30S, 31S, 32S, 33S, 34S, 35S, 36S, 37S, 38S, 39S, 40S, 41S, 42S, 43S, 44S, 45S, 46S, 47S, 48S. 49S, or 50S, and the antisense strand comprises pattern 5AS. In some embodiments, the sense strand comprises pattern 1S, 2S, 3S, 4S, 5S, 6S, 7S, 8S, 9S, 10S, 11S, 12S, 13S, 14S, 15S, 16S, 17S, 18S. 19S, 20S, 21S, 22S, 23S, 24S, 25S, 26S, 27S, 28S, 29S, 30S, 31S, 32S, 33S, 34S, 35S, 36S, 37S, 38S. 39S, 40S, 41S, 42S, 43S, 44S, 45S, 46S, 47S, 48S, 49S, or 50S, and the antisense strand comprises pattern 6AS. In some embodiments, the sense strand comprises pattern 1S, 2S, 3S, 4S, 5S, 6S, 7S, 8S. 9S, 10S, 11S, 12S, 13S, 14S, 15S, 16S, 17S, 18S, 19S, 20S, 21S, 22S, 23S, 24S, 25S, 26S, 27S, 28S. 29S, 30S, 31S, 32S, 33S, 34S, 35S, 36S, 37S, 38S, 39S, 40S, 41S, 42S, 43S, 44S, 45S, 46S, 47S, 48S. 49S, or 50S, and the antisense strand comprises pattern 7AS. In some embodiments, the sense strand comprises pattern 1S, 2S, 3S, 4S, 5S, 6S, 7S, 8S, 9S, 10S, 11S, 12S, 13S, 14S, 15S, 16S, 17S, 18S. 19S, 20S, 21S, 22S, 23S, 24S, 25S, 26S, 27S, 28S, 29S, 30S, 31S, 32S, 33S, 34S, 35S, 36S, 37S, 38S. 39S, 40S, 41S, 42S, 43S, 44S, 45S, 46S, 47S, 48S, 49S, or 50S, and the antisense strand comprises pattern 8AS. In some embodiments, the sense strand comprises pattern 1S, 2S, 3S, 4S, 5S, 6S, 7S, 8S. 9S, 10S, 11S, 12S, 13S, 14S, 15S, 16S, 17S, 18S, 19S, 20S, 21S, 22S, 23S, 24S, 25S, 26S, 27S, 28S. 29S, 30S, 31S, 32S, 33S, 34S, 35S, 36S, 37S, 38S, 39S, 40S, 41S, 42S, 43S, 44S, 45S, 46S, 47S, 48S. 49S, or 50S, and the antisense strand comprises pattern 9AS. In some embodiments, the sense strand comprises pattern 1S, 2S, 3S, 4S, 5S, 6S, 7S, 8S, 9S, 10S, 11S, 12S, 13S, 14S, 15S, 16S, 17S, 18S. 19S, 20S, 21S, 22S, 23S, 24S, 25S, 26S, 27S, 28S, 29S, 30S, 31S, 32S, 33S, 34S, 35S, 36S, 37S, 38S. 39S, 40S, 41S, 42S, 43S, 44S, 45S, 46S, 47S, 48S, 49S, or 50S, and the antisense strand comprises pattern 10AS.

[0197] In some embodiments, the sense strand comprises modification pattern 1S, 2S, 3S, 4S, 5S, 6S. 7S, 8S, 9S, 10S, 11S, 12S, 13S, 14S, 15S, 16S, 17S, 18S, 19S, 20S, 21S, 22S, 23S, 24S, 25S, 26S. 27S, 28S, 29S, 30S, 31S, 32S, 33S, 34S, 35S, 36S, 37S, 38S, 39S, 40S, 41S, 42S, 43S, 44S, 45S, 46S. 47S, 48S, 49S, or 50S. In some embodiments, the sense strand comprises modification pattern 1S, 2S. 3S, 4S, 5S, 6S, 7S, 8S, 9S, 10S, 11S, 12S, 13S, 14S, 15S, 16S, 17S, 18S, 19S, 20S, 21S, 22S, 23S. 24S, 25S, 26S, 27S, 28S, 29S, 30S, 31S, 32S, 33S, 34S, 35S, 36S, 37S, 38S, 39S or 40S. In some embodiments, the sense strand comprises modification pattern 1AS, 2AS, 3AS, 4AS, 5AS, 6AS, 7AS. 7AS, 8AS, 9AS or 10AS. In some embodiments, the antisense strand comprises modification pattern 1AS, 2AS, 3AS, 4AS, 5AS, 6AS, 7AS, 8AS, 9AS or 10AS. In some embodiments, the antisense strand comprises modification pattern 1S, 2S, 3S, 4S, 5S, 6S, 7S, 8S, 9S, 10S, 11S, 12S, 13S, 14S. 15S, 16S, 17S, 18S, 19S, 20S, 21S, 22S, 23S, 24S, 25S, 26S, 27S, 28S, 29S, 30S, 31S, 32S, 33S, 34S. 35S, 36S, 37S, 38S, 39S, 40S, 41S, 42S, 43S, 44S, 45S, 46S, 47S, 48S, 49S, or 50S. In some embodiments, the sense strand or the antisense strand comprises modification pattern ASO1.

[0198] In some embodiments, purines of the sense strand comprise 2′ fluoro modified purines. In some embodiments, purines of the sense strand comprise 2′-O-methyl modified purines. In some embodiments, purines of the sense strand comprise a mixture of 2′ fluoro and 2′-O-methyl modified purines. In some embodiments, all purines of the sense strand comprise 2° fluoro modified purines. In some embodiments, all purines of the sense strand comprise 2″-O-methyl modified purines. In some embodiments, all purines of the sense strand comprise a mixture of 2′ fluoro and 2′-O-methyl modified purines.

[0199] In some embodiments, pyrimidines of the sense strand comprise 2′ fluoro modified pyrimidines. In some embodiments, pyrimidines of the sense strand comprise 2′-O-methyl modified pyrimidines. In some embodiments, pyrimidines of the sense strand comprise a mixture of 2′ fluoro and 2′-O-methyl modified pyrimidines. In some embodiments, all pyrimidines of the sense strand comprise 2′ fluoro modified pyrimidines. In some embodiments, all pyrimidines of the sense strand comprise 2′-O-methyl modified pyrimidines. In some embodiments, all pyrimidines of the sense strand comprise a mixture of 2′ fluoro and 2′-O-methyl modified pyrimidines.

[0200] In some embodiments, purines of the sense strand comprise 2′ fluoro modified purines, and pyrimidines of the sense strand comprise a mixture of 2′ fluoro and 2′-O-methyl modified pyrimidines. In some embodiments, purines of the sense strand comprise 2′-O-methyl modified purines, and pyrimidines of the sense strand comprise a mixture of 2′ fluoro and 2-O-methyl modified pyrimidines. In some embodiments, purines of the sense strand comprise 2′ fluoro modified purines, and pyrimidines of the sense strand comprise 2′-O-methyl modified pyrimidines. In some embodiments, purines of the sense strand comprise 2′-O-methyl modified purines, and pyrimidines of the sense strand comprise 2′ fluoro modified pyrimidines. In some embodiments, pyrimidines of the sense strand comprise 2′ fluoro modified pyrimidines, and purines of the sense strand comprise a mixture of 2′ fluoro and 2′-O-methyl modified purines. In some embodiments, pyrimidines of the sense strand comprise 2′-O-methyl modified pyrimidines, and purines of the sense strand comprise a mixture of 2′ fluoro and 2′-O-methyl modified purines. In some embodiments, pyrimidines of the sense strand comprise 2′ fluoro modified pyrimidines, and purines of the sense strand comprise 2′-O-methyl modified purines. In some embodiments, pyrimidines of the sense strand comprise 2′-O-methyl modified pyrimidines, and purines of the sense strand comprise 2′ fluoro modified purines.

[0201] In some embodiments, all purines of the sense strand comprise 2′ fluoro modified purines, and all pyrimidines of the sense strand comprise a mixture of 2′ fluoro and 2′-O-methyl modified pyrimidines. In some embodiments, all purines of the sense strand comprise 2′-O-methyl modified purines, and all pyrimidines of the sense strand comprise a mixture of 2′ fluoro and 2′-O-methyl modified pyrimidines. In some embodiments, all purines of the sense strand comprise 2′ fluoro modified purines, and all pyrimidines of the sense strand comprise 2′-O-methyl modified pyrimidines. In some embodiments, all purines of the sense strand comprise 2′-O-methyl modified purines, and all pyrimidines of the sense strand comprise 2′ fluoro modified pyrimidines. In some embodiments, all pyrimidines of the sense strand comprise 2′ fluoro modified pyrimidines, and all purines of the sense strand comprise a mixture of 2′ fluoro and 2′-O-methyl modified purines. In some embodiments, all pyrimidines of the sense strand comprise 2′-O-methyl modified pyrimidines, and all purines of the sense strand comprise a mixture of 2′ fluoro and 2′-O-methyl modified purines. In some embodiments, all pyrimidines of the sense strand comprise 2′ fluoro modified pyrimidines, and all purines of the sense strand comprise 2′-O-methyl modified purines. In some embodiments, all pyrimidines of the sense strand comprise 2′-O-methyl modified pyrimidines, and all purines of the sense strand comprise 2′ fluoro modified purines.

[0202] In some embodiments, purines of the antisense strand comprise 2′ fluoro modified purines. In some embodiments, purines of the antisense strand comprise 2′-O-methyl modified purines. In some embodiments, purines of the antisense strand comprise a mixture of 2′ fluoro and 2′-O-methyl modified purines. In some embodiments, all purines of the antisense strand comprise 2′ fluoro modified purines. In some embodiments, all purines of the antisense strand comprise 2′-O-methyl modified purines. In some embodiments, all purines of the antisense strand comprise a mixture of 2′ fluoro and 2′-O-methyl modified purines.

[0203] In some embodiments, pyrimidines of the antisense strand comprise 2′ fluoro modified pyrimidines. In some embodiments, pyrimidines of the antisense strand comprise 2″-O-methyl modified pyrimidines. In some embodiments, pyrimidines of the antisense strand comprise a mixture of 2′ fluoro and 2′-O-methyl modified pyrimidines. In some embodiments, all pyrimidines of the antisense strand comprise 2′ fluoro modified pyrimidines. In some embodiments, all pyrimidines of the antisense strand comprise 2′-O-methyl modified pyrimidines. In some embodiments, all pyrimidines of the antisense strand comprise a mixture of 2′ fluoro and 2′-O-methyl modified pyrimidines.

[0204] In some embodiments, purines of the antisense strand comprise 2′ fluoro modified purines, and pyrimidines of the antisense strand comprise a mixture of 2′ fluoro and 2′-O-methyl modified pyrimidines. In some embodiments, purines of the antisense strand comprise 2′-O-methyl modified purines, and pyrimidines of the antisense strand comprise a mixture of 2′ fluoro and 2-O-methyl modified pyrimidines. In some embodiments, purines of the antisense strand comprise 2′ fluoro modified purines, and pyrimidines of the antisense strand comprise 2′-O-methyl modified pyrimidines. In some embodiments, purines of the antisense strand comprise 2′-O-methyl modified purines, and pyrimidines of the antisense strand comprise 2′ fluoro modified pyrimidines. In some embodiments, pyrimidines of the antisense strand comprise 2′ fluoro modified pyrimidines, and purines of the antisense strand comprise a mixture of 2′ fluoro and 2′-O-methyl modified purines. In some embodiments, pyrimidines of the antisense strand comprise 2′-O-methyl modified pyrimidines, and purines of the antisense strand comprise a mixture of 2′ fluoro and 2′-O-methyl modified purines. In some embodiments, pyrimidines of the antisense strand comprise 2″ fluoro modified pyrimidines, and purines of the antisense strand comprise 2′-O-methyl modified purines. In some embodiments, pyrimidines of the antisense strand comprise 2′-O-methyl modified pyrimidines, and purines of the antisense strand comprise 2′ fluoro modified purines.

[0205] In some embodiments, all purines of the antisense strand comprise 2′ fluoro modified purines, and all pyrimidines of the antisense strand comprise a mixture of 2′ fluoro and 2′-O-methyl modified pyrimidines. In some embodiments, all purines of the antisense strand comprise 2′-O-methyl modified purines, and all pyrimidines of the antisense strand comprise a mixture of 2′ fluoro and 2′-O-methyl modified pyrimidines. In some embodiments, all purines of the antisense strand comprise 2′ fluoro modified purines, and all pyrimidines of the antisense strand comprise 2′-O-methyl modified pyrimidines. In some embodiments, all purines of the antisense strand comprise 2′-O-methyl modified purines, and all pyrimidines of the antisense strand comprise 2′ fluoro modified pyrimidines. In some embodiments, all pyrimidines of the antisense strand comprise 2° fluoro modified pyrimidines, and all purines of the antisense strand comprise a mixture of 2′ fluoro and 2′-O-methyl modified purines. In some embodiments, all pyrimidines of the antisense strand comprise 2′-O-methyl modified pyrimidines, and all purines of the antisense strand comprise a mixture of 2′ fluoro and 2-O-methyl modified purines. In some embodiments, all pyrimidines of the antisense strand comprise 2′ fluoro modified pyrimidines, and all purines of the antisense strand comprise 2′-O-methyl modified purines. In some embodiments, all pyrimidines of the antisense strand comprise 2-O-methyl modified pyrimidines, and all purines of the antisense strand comprise 2′ fluoro modified purines.

[0206] Disclosed herein, in some embodiments, are modified oligonucleotides. The modified oligonucleotide may be an siRNA that includes modifications to the ribose rings, and phosphate linkages. The modifications may be in particular patterns that maximize cell delivery, stability, and efficiency. The siRNA may also include a vinyl phosphonate and a hydrophobic group. These modifications may aid in delivery to a cell or tissue within a subject. The modified oligonucleotide may be used in a method such as a treatment method or a method of reducing gene expression.

[0207] In some embodiments, the oligonucleotide comprises a duplex consisting of 21 nucleotide single strands with base pairing between 19 of the base pairs. In some embodiments, the duplex comprises single-stranded 2 nucleotide overhangs are at the 3′ ends of each strand. One strand (antisense strand) is complementary to a PLIN1 mRNA. Each end of the antisense strand has one to two phosphorothioate bonds. The 5′ end has an optional phosphate mimic such as a vinyl phosphonate. In some embodiments, the oligonucleotide is used to knock down a PLIN1 mRNA or a target protein. In some embodiments, the sense strand has the same sequence as the PLIN1 mRNA. In some embodiments, there are 1-2 phosphorothioates at the 3′ end. In some embodiments, there are 1 or no phosphorothioates at the 5′ end. In some embodiments, there is a hydrophobic conjugate of 12 to 25 carbons attached at the 5′ end via a phosphodiester bond.

[0208] In some cases, the sense strand of any of the siRNAs comprises siRNA with a particular modification pattern. In some embodiments of the modification pattern, position 9 counting from the 5′ end of the sense strand may have a 2′F modification. In some embodiments, when position 9 of the sense strand is a pyrimidine, then all purines in the sense strand have a 2′OMe modification. In some embodiments, when position 9 is the only pyrimidine between positions 5 and 11 of the sense stand, then position 9 is the only position with a 2′F modification in the sense strand. In some embodiments, when position 9 and only one other base between positions 5 and 11 of the sense strand are pyrimidines, then both of these pyrimidines are the only two positions with a 2′F modification in the sense strand. In some embodiments, when position 9 and only two other bases between positions 5 and 11 of the sense strand are pyrimidines, and those two other pyrimidines are in adjacent positions so that there would be not three 2′F modifications in a row, then any combination of 2′F modifications can be made that give three 2′F modifications in total. In some embodiments, when there are more than 2 pyrimidines between positions 5 and 11 of the sense strand, then all combinations of pyrimidines having the 2′F modification are allowed that have three to five 2′F modifications in total, provided that the sense strand does not have three 2′F modifications in a row. In some cases, the sense strand of any of the siRNAs comprises a modification pattern which conforms to any or all of these sense strand rules.

[0209] In some embodiments, when position 9 of the sense strand is a purine, then all purines in the sense strand have a 2′OMe modification. In some embodiments, when position 9 is the only purine between positions 5 and 11 of the sense stand, then position 9 is the only position with a 2′F modification in the sense strand. In some embodiments, when position 9 and only one other base between positions 5 and 11 of the sense strand are purines, then both of these purines are the only two positions with a 2′F modification in the sense strand. In some embodiments, when position 9 and only two other bases between positions 5 and 11 of the sense strand are purines, and those two other purines are in adjacent positions so that there would be not three 2′F modifications in a row, then any combination of 2′F modifications can be made that give three 2′F modifications in total. In some embodiments, when there are more than 2 purines between positions 5 and 11 of the sense strand, then all combinations of purines having the 2′F modification are allowed that have three to five 2′F modifications in total, provided that the sense strand does not have three 2′F modifications in a row. In some cases, the sense strand of any of the siRNAs comprises a modification pattern which conforms to any or all of these sense strand rules.

[0210] In some cases, position 9 of the sense strand can be a 2′ deoxy. In these cases, 2′F and 2′OMe modifications may occur at the other positions of the sense strand. In some cases, the sense strand of any of the siRNAs comprises a modification pattern which conforms to these sense strand rules.

[0211] In some cases, the sense strand of any of the siRNAs comprises a modification pattern which conforms to these sense strand rules.

[0212] Disclosed herein, in some embodiments are compositions comprising an oligonucleotide that targets PLIN1 and when administered to a cell decreases expression of PLIN1, wherein the oligonucleotide comprises a small interfering RNA (siRNA) comprising a sense strand and an antisense strand, wherein the sense strand comprises a sense strand sequence described herein in which at least one internucleoside linkage is modified and at least one nucleoside is modified, or an sense strand sequence comprising 1 or 2 nucleoside substitutions, additions, or deletions of the oligonucleotide sequence in which at least one internucleoside linkage is modified and at least one nucleoside is modified, and wherein the antisense strand comprises an antisense strand sequence described herein in which at least one internucleoside linkage is modified and at least one nucleoside is modified, or an oligonucleotide sequence comprising 1 or 2 nucleoside substitutions, additions, or deletions of the antisense strand sequence in which at least one internucleoside linkage is modified and at least one nucleoside is modified. Some embodiments relate to methods that include administering the composition to a subject.

[0213] In some embodiments, the siRNA comprises a sense strand, an antisense strand, and a lipid moiety connected to an end of the sense or antisense strand; wherein the lipid moiety comprises a phenyl or cyclohexyl linker, wherein the linker is connected to a lipid and to the end of the sense or antisense strand. In some embodiments, any one of the following is true with regard to the sense strand; all purines comprise 2′ fluoro modified purines, and all pyrimidines comprise a mixture of 2′ fluoro and 2′-O-methyl modified pyrimidines; all purines comprise 2′-O-methyl modified purines, and all pyrimidines comprise a mixture of 2′ fluoro and 2′-O-methyl modified pyrimidines; all purines comprise 2′ fluoro modified purines, and all pyrimidines comprise 2′-O-methyl modified pyrimidines; all pyrimidines comprise 2′ fluoro modified pyrimidines, and all purines comprise a mixture of 2′ fluoro and 2′-O-methyl modified purines; all pyrimidines comprise 2′-O-methyl modified pyrimidines, and all purines comprise a mixture of 2′ fluoro and 2′-O-methyl modified purines; or all pyrimidines comprise 2′ fluoro modified pyrimidines, and all purines comprise 2′-O-methyl modified purines. In some embodiments, any one of the following is true with regard to the antisense strand; all purines comprise 2′ fluoro modified purines, and all pyrimidines comprise a mixture of 2′ fluoro and 2′-O-methyl modified pyrimidines; all purines comprise 2′-O-methyl modified purines, and all pyrimidines comprise a mixture of 2′ fluoro and 2′-O-methyl modified pyrimidines; all purines comprise 2′-O-methyl modified purines, and all pyrimidines comprise 2′ fluoro modified pyrimidines; all pyrimidines comprise 2′ fluoro modified pyrimidines, and all purines comprise a mixture of 2′ fluoro and 2′-O-methyl modified purines; all pyrimidines comprise 2′-O-methyl modified pyrimidines, and all purines comprise a mixture of 2′ fluoro and 2″-O-methyl modified purines; or all pyrimidines comprise 2′-O-methyl modified pyrimidines, and all purines comprise 2′ fluoro modified purines. In some embodiments, the siRNA comprises comprising a sense strand and an antisense strand; wherein the antisense strand comprises a 5′ end comprising a vinyl phosphonate and 2 phosphorothioate linkages, and a 3′ end comprising 2 phosphorothioate linkages; wherein the sense strand comprises a 5′ end comprising a hydrophobic moiety, and a 3′ end comprising 2 phosphorothioate linkages; wherein any one of the following is true with regard to the sense strand; all purines comprise 2′ fluoro modified purines, and all pyrimidines comprise a mixture of 2′ fluoro and 2′-O-methyl modified pyrimidines, all purines comprise 2′-O-methyl modified purines, and all pyrimidines comprise a mixture of 2′ fluoro and 2′-O-methyl modified pyrimidines, all purines comprise 2′ fluoro modified purines, and all pyrimidines comprise 2′-O-methyl modified pyrimidines, all pyrimidines comprise 2′ fluoro modified pyrimidines, and all purines comprise a mixture of 2′ fluoro and 2′-O-methyl modified purines, all pyrimidines comprise 2′-O-methyl modified pyrimidines, and all purines comprise a mixture of 2′ fluoro and 2-O-methyl modified purines, or all pyrimidines comprise 2′ fluoro modified pyrimidines, and all purines comprise 2′-O-methyl modified purines; and wherein any one of the following is true with regard to the antisense strand; all purines comprise 2′ fluoro modified purines, and all pyrimidines comprise a mixture of 2′ fluoro and 2′-O-methyl modified pyrimidines, all purines comprise 2′-O-methyl modified purines, and all pyrimidines comprise a mixture of 2′ fluoro and 2′-O-methyl modified pyrimidines, all purines comprise 2′-O-methyl modified purines, and all pyrimidines comprise 2′ fluoro modified pyrimidines, all pyrimidines comprise 2′ fluoro modified pyrimidines, and all purines comprise a mixture of 2′ fluoro and 2-O-methyl modified purines, all pyrimidines comprise 2′-O-methyl modified pyrimidines, and all purines comprise a mixture of 2′ fluoro and 2′-O-methyl modified purines, or all pyrimidines comprise 2′-O-methyl modified pyrimidines, and all purines comprise 2″ fluoro modified purines.

[0214] In some embodiments, the antisense strand comprises one or two 3′ phosphorothioate linkages. For example, there may be a phosphorothioate linkage between the first and second nucleotides from the 3′ end of the antisense strand, or there may be phosphorothioate linkages between the first, second and third nucleotides from the 3′ end of the antisense strand. In some embodiments, the sense strand comprises one or two 5′ phosphorothioate linkages. For example, there may be a phosphorothioate linkage between the first and second nucleotides from the 5′ end of the sense strand, or there may be phosphorothioate linkages between the first, second and third nucleotides from the 5′ end of the sense strand. In some embodiments, the sense strand does not comprise one or two 5′ phosphorothioate linkages. For example, in some embodiments, there are no phosphorothioate linkages between the last 3 nucleotides at the 5′ end of the sense strand. In some embodiments, the sense strand comprises 5′ phosphate linkages. In some embodiments, the sense strand comprises one or two 3′ phosphorothioate linkages. For example, there may be a phosphorothioate linkage between the first and second nucleotides from the 3′ end of the sense strand, or there may be phosphorothioate linkages between the first, second and third nucleotides from the 3″ end of the sense strand.

[0215] In some embodiments, the composition comprises an oligonucleotide that inhibits the expression of a target nucleic acid, wherein the oligonucleotide comprises an siRNA comprising a sense strand and an antisense strand, wherein the oligonucleotide comprises a hydrophobic moiety. In some embodiments, the hydrophobic moiety may be attached at the 5′ end of the sense strand. In some embodiments, the hydrophobic moiety may be attached at the 3′ end of the sense strand. In some embodiments, the hydrophobic moiety may be attached at the 5′ end of the antisense strand. In some embodiments, the hydrophobic moiety may be attached at the 3′ end of the antisense strand.

[0216] In some embodiments, the composition comprises an oligonucleotide that inhibits the expression of a target nucleic acid, wherein the oligonucleotide comprises an siRNA comprising a sense strand and an antisense strand, wherein the oligonucleotide comprises one or more vinyl phosphonate. In some embodiments, the one or more vinyl phosphonate may be attached at the 5′ end of the sense strand. In some embodiments, the one or more vinyl phosphonate may be attached at the 3′ end of the sense strand. In some embodiments, the one or more vinyl phosphonate may be attached at the 5′ end of the antisense strand. In some embodiments, the one or more vinyl phosphonate may be attached at the 3′ end of the antisense strand.

[0217] In some embodiments, the sense strand comprises or consists of RNA or modified RNA nucleotides. In some embodiments, the sense strand comprises a deoxy nucleoside. The deoxy nucleoside may include a DNA nucleoside. In some embodiments, the deoxy nucleoside comprises or consists of a 2′ deoxy nucleoside. The deoxy nucleoside may be at a position within the sense strand (5′ to 3′, where the 5′ position is 1). The position within the sense strand may be or include position 2, 4, 6, 8, 9, 10, 12, 14, 16, or 18, or a combination of said positions. The position within the sense strand may be or include position 2, 4, 6, 8, 10, 12, 14, 16, or 18, or a combination of said positions. The position within the sense strand may be or include position 2, 6, 9, 10, 14, or 18, or a combination of said positions. The position within the sense strand may be or include position 2, 6, 10, 14, or 18, or a combination of said positions. The position within the sense strand may be or include position 4, 8, 9, 12, or 16, or a combination of said positions. The position within the sense strand may be or include position 4, 8, 12, or 16, or a combination of said positions. The position within the sense strand may include position 9. The position within the sense strand may be position 9. The sense strand may include 1, 2, 3, 4, 5, 6, 7, 8, 9, 10, 11, 12, 13, 14, 15, 16, 17, 18, or 19 deoxy nucleosides. In some embodiments, the sense strand includes 1 deoxy nucleoside. The sense strand may include 1, 2, 3, 4, 5, 6, 7, 8, 9, 10, 11, 12, 13, 14, 15, 16, 17, 18, or 19 deoxy nucleosides, or a range of deoxy nucleosides defined by any two of the aforementioned numbers of deoxy nucleosides. The sense strand may include deoxy nucleosides at all even positions. The sense strand may include deoxy nucleosides at some even positions. The sense strand may include deoxy nucleosides at every other even position. The sense strand may include 1 deoxy nucleoside. The sense strand may include at least 1 deoxy nucleoside. The sense strand may include at least 2 deoxy nucleosides. The sense strand may include at least 3 deoxy nucleosides. The sense strand may include at least 4 deoxy nucleosides. The sense strand may include at least 5 deoxy nucleosides. The sense strand may include at least 6 deoxy nucleosides. The sense strand may include at least 7 deoxy nucleosides. The sense strand may include at least 8 deoxy nucleosides. The sense strand may include at least 9 deoxy nucleosides. The sense strand may include at least 10 deoxy nucleosides. The sense strand may include no greater than 2 deoxy nucleosides. The sense strand may include no greater than 3 deoxy nucleosides. The sense strand may include no greater than 4 deoxy nucleosides. The sense strand may include no greater than 5 deoxy nucleosides. The sense strand may include no greater than 6 deoxy nucleosides. The sense strand may include no greater than 7 deoxy nucleosides. The sense strand may include no greater than 8 deoxy nucleosides. The sense strand may include no greater than 9 deoxy nucleosides. The sense strand may include no greater than 10 deoxy nucleosides.

[0218] In some embodiments, the siRNA comprises the sense strand and/or the antisense strand sequence of an siRNA in Table 10, or a nucleic acid sequence thereof having 3 or 4 nucleoside substitutions, additions, or deletions. In some embodiments, the siRNA comprises the sense strand and/or the antisense strand sequence of an siRNA in Table 10, or a nucleic acid sequence thereof having 1 or 2 nucleoside substitutions, additions, or deletions. In some embodiments, the siRNA comprises the sense strand and/or the antisense strand sequence of an siRNA in Table 10. The siRNA may include the same internucleoside linkage modifications or nucleoside modifications as those in Table 10. The siRNA may include any different internucleoside linkage modifications or nucleoside modifications different from those in Table 10. The siRNA may include some unmodified internucleoside linkages or nucleosides.

[0219] In some embodiments, the siRNA comprises the sense strand and/or the antisense strand sequence of an siRNA in Table 11, or a nucleic acid sequence thereof having 3 or 4 nucleoside substitutions, additions, or deletions. In some embodiments, the siRNA comprises the sense strand and/or the antisense strand sequence of an siRNA in Table 11, or a nucleic acid sequence thereof having 1 or 2 nucleoside substitutions, additions, or deletions. In some embodiments, the siRNA comprises the sense strand and/or the antisense strand sequence of an siRNA in Table 11. The siRNA may include the same internucleoside linkage modifications or nucleoside modifications as those in Table 11. The siRNA may include any different internucleoside linkage modifications or nucleoside modifications different from those in Table 11. The siRNA may include some unmodified internucleoside linkages or nucleosides.

[0220] In some embodiments, the siRNA comprises the sense strand and/or the antisense strand sequence of an siRNA in Table 12, or a nucleic acid sequence thereof having 3 or 4 nucleoside substitutions, additions, or deletions. In some embodiments, the siRNA comprises the sense strand and/or the antisense strand sequence of an siRNA in Table 12, or a nucleic acid sequence thereof having 1 or 2 nucleoside substitutions, additions, or deletions. In some embodiments, the siRNA comprises the sense strand and/or the antisense strand sequence of an siRNA in Table 12. The siRNA may include the same internucleoside linkage modifications or nucleoside modifications as those in Table 12. The siRNA may include any different internucleoside linkage modifications or nucleoside modifications different from those in Table 12. The siRNA may include some unmodified internucleoside linkages or nucleosides.

[0221] In some embodiments, the siRNA comprises the sense strand and/or the antisense strand sequence of an siRNA in Table 14, or a nucleic acid sequence thereof having 3 or 4 nucleoside substitutions, additions, or deletions. In some embodiments, the siRNA comprises the sense strand and/or the antisense strand sequence of an siRNA in Table 14, or a nucleic acid sequence thereof having 1 or 2 nucleoside substitutions, additions, or deletions. In some embodiments, the siRNA comprises the sense strand and/or the antisense strand sequence of an siRNA in Table 14. The siRNA may include the same internucleoside linkage modifications or nucleoside modifications as those in Table 14. The siRNA may include any different internucleoside linkage modifications or nucleoside modifications different from those in Table 14. The siRNA may include some unmodified internucleoside linkages or nucleosides.

[0222] In some embodiments, the siRNA comprises the sense strand and/or the antisense strand sequence of an siRNA in Table 16, or a nucleic acid sequence thereof having 3 or 4 nucleoside substitutions, additions, or deletions. In some embodiments, the siRNA comprises the sense strand and/or the antisense strand sequence of an siRNA in Table 16, or a nucleic acid sequence thereof having 1 or 2 nucleoside substitutions, additions, or deletions. In some embodiments, the siRNA comprises the sense strand and/or the antisense strand sequence of an siRNA in Table 16. The siRNA may include the same internucleoside linkage modifications or nucleoside modifications as those in Table 16. The siRNA may include any different internucleoside linkage modifications or nucleoside modifications different from those in Table 16. The siRNA may include some unmodified internucleoside linkages or nucleosides.

[0223] In some embodiments, the siRNA comprises the sense strand and/or the antisense strand sequence of an siRNA in Table 18, or a nucleic acid sequence thereof having 3 or 4 nucleoside substitutions, additions, or deletions. In some embodiments, the siRNA comprises the sense strand and/or the antisense strand sequence of an siRNA in Table 18, or a nucleic acid sequence thereof having 1 or 2 nucleoside substitutions, additions, or deletions. In some embodiments, the siRNA comprises the sense strand and/or the antisense strand sequence of an siRNA in Table 18. The siRNA may include the same internucleoside linkage modifications or nucleoside modifications as those in Table 18. The siRNA may include any different internucleoside linkage modifications or nucleoside modifications different from those in Table 18. The siRNA may include some unmodified internucleoside linkages or nucleosides.

[0224] Some siRNAs include ETD01754 or a variant thereof. In some embodiments, the siRNA comprises a sense strand having a sequence in accordance with SEQ ID NO: 5947. In some embodiments, the sense strand sequence comprises or consists of sequence at least 75% identical to SEQ ID NO: 5947, at least 80% identical to SEQ ID NO: 5947, at least 85% identical to SEQ ID NO: 5947, at least 90% identical to SEQ ID NO: 5947, or at least 95% identical to SEQ ID NO: 5947. In some embodiments, the sense strand sequence comprises or consists of the sequence of SEQ ID NO 5947, or a sense strand sequence thereof having 1, 2, 3, or 4 nucleoside substitutions, additions, or deletions. In some embodiments, the sense strand sequence comprises or consists of the sequence of SEQ ID NO: 5947, or a sense strand sequence thereof having 1 or 2 nucleoside substitutions, additions, or deletions. In some embodiments, the sense strand sequence comprises or consists of a sequence 100% identical to SEQ ID NO: 5947. The sense strand may comprise any modifications or modification pattern described herein. The sense strand may comprise a moiety such as a GalNAc moiety or a lipid moiety. In some embodiments, the siRNA comprises an antisense strand having a sequence in accordance with SEQ ID NO: 5960. In some embodiments, the antisense strand sequence comprises or consists of sequence at least 75% identical to SEQ ID NO: 5960, at least 80% identical to SEQ ID NO: 5960, at least 85% identical to SEQ ID NO: 5960, at least 90% identical to SEQ ID NO: 5960, or at least 95% identical to SEQ ID NO: 5960. In some embodiments, the antisense strand sequence comprises or consists of the sequence of SEQ ID NO 5960, or an antisense strand sequence thereof having 1, 2, 3, or 4 nucleoside substitutions, additions, or deletions. In some embodiments, the antisense strand sequence comprises or consists of the sequence of SEQ ID NO: 5960, or an antisense strand sequence thereof having 1 or 2 nucleoside substitutions, additions, or deletions. In some embodiments, the antisense strand sequence comprises or consists of a sequence 100% identical to SEQ ID NO: 5960. The antisense strand may comprise any modifications or modification pattern described herein. The antisense strand may comprise a moiety such as a GalNAc moiety or a lipid moiety.

[0225] Some siRNAs include ETD01900 or a variant thereof. In some embodiments, the siRNA comprises a sense strand having a sequence in accordance with SEQ ID NO: 5951. In some embodiments, the sense strand sequence comprises or consists of sequence at least 75% identical to SEQ ID NO: 5951, at least 80% identical to SEQ ID NO: 5951, at least 85% identical to SEQ ID NO: 5951, at least 90% identical to SEQ ID NO: 5951, or at least 95% identical to SEQ ID NO: 5951. In some embodiments, the sense strand sequence comprises or consists of the sequence of SEQ ID NO 5951, or a sense strand sequence thereof having 1, 2, 3, or 4 nucleoside substitutions, additions, or deletions. In some embodiments, the sense strand sequence comprises or consists of the sequence of SEQ ID NO: 5951, or a sense strand sequence thereof having 1 or 2 nucleoside substitutions, additions, or deletions. In some embodiments, the sense strand sequence comprises or consists of a sequence 100% identical to SEQ ID NO: 5951. The sense strand may comprise any modifications or modification pattern described herein. The sense strand may comprise a moiety such as a GalNAc moiety or a lipid moiety. In some embodiments, the siRNA comprises an antisense strand having a sequence in accordance with SEQ ID NO: 5964. In some embodiments, the antisense strand sequence comprises or consists of sequence at least 75% identical to SEQ ID NO: 5964, at least 80% identical to SEQ ID NO: 5964, at least 85% identical to SEQ ID NO: 5964, at least 90% identical to SEQ ID NO: 5964, or at least 95% identical to SEQ ID NO: 5964. In some embodiments, the antisense strand sequence comprises or consists of the sequence of SEQ ID NO 5964, or an antisense strand sequence thereof having 1, 2, 3, or 4 nucleoside substitutions, additions, or deletions. In some embodiments, the antisense strand sequence comprises or consists of the sequence of SEQ ID NO: 5964, or an antisense strand sequence thereof having 1 or 2 nucleoside substitutions, additions, or deletions. In some embodiments, the antisense strand sequence comprises or consists of a sequence 100% identical to SEQ ID NO: 5964. The antisense strand may comprise any modifications or modification pattern described herein. The antisense strand may comprise a moiety such as a GalNAc moiety or a lipid moiety.

[0226] Some siRNAs include ETD01901 or a variant thereof. In some embodiments, the siRNA comprises a sense strand having a sequence in accordance with SEQ ID NO: 5952. In some embodiments, the sense strand sequence comprises or consists of sequence at least 75% identical to SEQ ID NO: 5952, at least 80% identical to SEQ ID NO: 5952, at least 85% identical to SEQ ID NO: 5952, at least 90% identical to SEQ ID NO: 5952, or at least 95% identical to SEQ ID NO: 5952. In some embodiments, the sense strand sequence comprises or consists of the sequence of SEQ ID NO 5952, or a sense strand sequence thereof having 1, 2, 3, or 4 nucleoside substitutions, additions, or deletions. In some embodiments, the sense strand sequence comprises or consists of the sequence of SEQ ID NO: 5952, or a sense strand sequence thereof having 1 or 2 nucleoside substitutions, additions, or deletions. In some embodiments, the sense strand sequence comprises or consists of a sequence 100% identical to SEQ ID NO: 5952. The sense strand may comprise any modifications or modification pattern described herein. The sense strand may comprise a moiety such as a GalNAc moiety or a lipid moiety. In some embodiments, the siRNA comprises an antisense strand having a sequence in accordance with SEQ ID NO: 5965. In some embodiments, the antisense strand sequence comprises or consists of sequence at least 75% identical to SEQ ID NO: 5965, at least 80% identical to SEQ ID NO: 5965, at least 85% identical to SEQ ID NO: 5965, at least 90% identical to SEQ ID NO: 5965, or at least 95% identical to SEQ ID NO: 5965. In some embodiments, the antisense strand sequence comprises or consists of the sequence of SEQ ID NO 5965, or an antisense strand sequence thereof having 1, 2, 3, or 4 nucleoside substitutions, additions, or deletions. In some embodiments, the antisense strand sequence comprises or consists of the sequence of SEQ ID NO: 5965, or an antisense strand sequence thereof having 1 or 2 nucleoside substitutions, additions, or deletions. In some embodiments, the antisense strand sequence comprises or consists of a sequence 100% identical to SEQ ID NO: 5965. The antisense strand may comprise any modifications or modification pattern described herein. The antisense strand may comprise a moiety such as a GalNAc moiety or a lipid moiety.

[0227] Some siRNAs include ETD01902 or a variant thereof. In some embodiments, the siRNA comprises a sense strand having a sequence in accordance with SEQ ID NO: 5953. In some embodiments, the sense strand sequence comprises or consists of sequence at least 75% identical to SEQ ID NO: 5953, at least 80% identical to SEQ ID NO: 5953, at least 85% identical to SEQ ID NO: 5953, at least 90% identical to SEQ ID NO: 5953, or at least 95% identical to SEQ ID NO: 5953. In some embodiments, the sense strand sequence comprises or consists of the sequence of SEQ ID NO 5953, or a sense strand sequence thereof having 1, 2, 3, or 4 nucleoside substitutions, additions, or deletions. In some embodiments, the sense strand sequence comprises or consists of the sequence of SEQ ID NO: 5953, or a sense strand sequence thereof having 1 or 2 nucleoside substitutions, additions, or deletions. In some embodiments, the sense strand sequence comprises or consists of a sequence 100% identical to SEQ ID NO: 5953. The sense strand may comprise any modifications or modification pattern described herein. The sense strand may comprise a moiety such as a GalNAc moiety or a lipid moiety. In some embodiments, the siRNA comprises an antisense strand having a sequence in accordance with SEQ ID NO: 5966. In some embodiments, the antisense strand sequence comprises or consists of sequence at least 75% identical to SEQ ID NO: 5966, at least 80% identical to SEQ ID NO: 5966, at least 85% identical to SEQ ID NO: 5966, at least 90% identical to SEQ ID NO: 5966, or at least 95% identical to SEQ ID NO: 5966. In some embodiments, the antisense strand sequence comprises or consists of the sequence of SEQ ID NO 5966, or an antisense strand sequence thereof having 1, 2, 3, or 4 nucleoside substitutions, additions, or deletions. In some embodiments, the antisense strand sequence comprises or consists of the sequence of SEQ ID NO: 5966, or an antisense strand sequence thereof having 1 or 2 nucleoside substitutions, additions, or deletions. In some embodiments, the antisense strand sequence comprises or consists of a sequence 100% identical to SEQ ID NO: 5966. The antisense strand may comprise any modifications or modification pattern described herein. The antisense strand may comprise a moiety such as a GalNAc moiety or a lipid moiety.

### 4. ASO Modification Patterns

[0228] In some embodiments, the composition comprises an oligonucleotide that inhibits the expression of PLIN1, wherein the oligonucleotide comprises an antisense oligonucleotide (ASO). In some embodiments, the ASO comprises modification pattern ASO1:

5″-nsnsnsnsnsdNsdNsdNsdNsdNsdNsdNsdNsdNsdNsnsnsnsnsn-3′ (SEQ ID NO: 6075), wherein “dN” is any deoxynucleotide, “n” is a 2′O-methyl or 2′O-methoxyethyl-modified nucleoside, and “'s” is a phosphorothioate linkage. In some embodiments, the ASO comprises modification 1S, 2S, 3S, 4S, 5S, 6S, 7S, 8S, 9S, 10S, 11S, 12S, 13S, 14S, 15S, 16S, 17S, 18S, 19S, 20S, 21S, 22S, 23S, 24S, 25S, 26S, 27S, 28S, 29S, 30S, 31S, 32S, 33S, 34S, 35S, 36S, 37S, 38S, 39S, 40S, 41S, 42S, 43S, 44S, 45S, 46S, 47S, 48S, 49S, 50S, 1AS, 2AS, 3AS, 4AS, 5AS, 6AS, 7AS, 8AS, 9AS or 10AS.

### D. Formulations

[0229] In some embodiments, the composition is a pharmaceutical composition. In some embodiments, the composition is sterile. In some embodiments, the composition further comprises a pharmaceutically acceptable carrier.

[0230] In some embodiments, the pharmaceutically acceptable carrier comprises water. In some embodiments, the pharmaceutically acceptable carrier comprises a buffer. In some embodiments, the pharmaceutically acceptable carrier comprises a saline solution. In some embodiments, the pharmaceutically acceptable carrier comprises water, a buffer, or a saline solution. In some embodiments, the composition comprises a liposome. In some embodiments, the pharmaceutically acceptable carrier comprises liposomes, lipids, nanoparticles, proteins, protein-antibody complexes, peptides, cellulose, nanogel, or a combination thereof.

### II. Methods and Uses

[0231] Disclosed herein, in some embodiments, are methods of administering a composition described herein to a subject. Some embodiments relate to use a composition described herein, such as administering the composition to a subject.

[0232] Some embodiments relate to a method of treating a disorder in a subject in need thereof. Some embodiments relate to use of a composition described herein in the method of treatment. Some embodiments include administering a composition described herein to a subject with the disorder. In some embodiments, the administration treats the disorder in the subject. In some embodiments, the composition treats the disorder in the subject.

[0233] In some embodiments, the treatment comprises prevention, inhibition, or reversion of the disorder in the subject. Some embodiments relate to use of a composition described herein in the method of preventing, inhibiting, or reversing the disorder. Some embodiments relate to a method of preventing, inhibiting, or reversing a disorder a disorder in a subject in need thereof. Some embodiments include administering a composition described herein to a subject with the disorder. In some embodiments, the administration prevents, inhibits, or reverses the disorder in the subject. In some embodiments, the composition prevents, inhibits, or reverses the disorder in the subject.

[0234] Some embodiments relate to a method of preventing a disorder a disorder in a subject in need thereof. Some embodiments relate to use of a composition described herein in the method of preventing the disorder. Some embodiments include administering a composition described herein to a subject with the disorder. In some embodiments, the administration prevents the disorder in the subject. In some embodiments, the composition prevents the disorder in the subject.

[0235] Some embodiments relate to a method of inhibiting a disorder a disorder in a subject in need thereof. Some embodiments relate to use of a composition described herein in the method of inhibiting the disorder. Some embodiments include administering a composition described herein to a subject with the disorder. In some embodiments, the administration inhibits the disorder in the subject. In some embodiments, the composition inhibits the disorder in the subject.

[0236] Some embodiments relate to a method of reversing a disorder a disorder in a subject in need thereof. Some embodiments relate to use of a composition described herein in the method of reversing the disorder. Some embodiments include administering a composition described herein to a subject with the disorder. In some embodiments, the administration reverses the disorder in the subject. In some embodiments, the composition reverses the disorder in the subject.

[0237] In some embodiments, the administration is systemic. In some embodiments, the administration is intravenous. In some embodiments, the administration is by injection.

### A. Disorders

[0238] Some embodiments of the methods described herein include treating a disorder in a subject in need thereof. In some embodiments, the disorder is a cardiometabolic disorder. The cardiometabolic disorder may comprise a cardiovascular disorder, a cerebrovascular disorder, a hypertensive disorder, or a metabolic disorder, or a combination thereof.

[0239] In some embodiments, the disorder comprises a cardiovascular disorder. Non-limiting examples of cardiovascular disorders include coronary artery disease, peripheral vascular disease, peripheral arterial disease, myocardial infarction, heart failure, or hypertension. In some embodiments, the cardiovascular disorder includes coronary artery disease. In some embodiments, the cardiovascular disorder includes peripheral vascular disease. In some embodiments, the cardiovascular disorder includes peripheral arterial disease. In some embodiments, the cardiovascular disorder includes myocardial infarction. In some embodiments, the cardiovascular disorder includes heart failure. In some embodiments, the cardiovascular disorder includes hypertension.

[0240] In some embodiments, the disorder comprises a cerebrovascular disorder. A non-limiting example of a cerebrovascular disorder may include a stroke.

[0241] In some embodiments, the disorder comprises a metabolic disorder. Non-limiting examples of metabolic disorders include hyperlipidemia, hypertriglyceridemia, diabetes, or a liver disease such as non-alcoholic fatty liver disease (NAFLD) or non-alcoholic steatohepatitis (NASH). In some embodiments, the metabolic disorder includes hyperlipidemia. In some embodiments, the metabolic disorder includes hypertriglyceridemia. In some embodiments, the metabolic disorder includes diabetes. In some embodiments, the metabolic disorder includes a liver disease. In some embodiments, the liver disease includes NAFLD. In some embodiments, the liver disease includes NASH.

[0242] In some embodiments, the disorder comprises a hypertensive disorder. The hypertensive disorder may include hypertension.

[0243] The disorder may include hyperlipidemia, hypertriglyceridemia, coronary artery disease, myocardial infarction, heart failure, stroke, hypertension, diabetes, non-alcoholic fatty liver disease (NAFLD), or non-alcoholic steatohepatitis (NASH), or a combination thereof. In some embodiments, the disorder comprises hyperlipidemia. In some embodiments, the disorder comprises hypertriglyceridemia. In some embodiments, the disorder comprises coronary artery disease. In some embodiments, the disorder comprises peripheral vascular disease. In some embodiments, the disorder comprises peripheral arterial disease. In some embodiments, the disorder comprises myocardial infarction. In some embodiments, the disorder comprises heart failure. In some embodiments, the disorder comprises stroke. In some embodiments, the disorder comprises hypertension. In some embodiments, the disorder comprises diabetes. In some embodiments, the disorder comprises a liver disease. In some embodiments, the disorder comprises NAFLD. In some embodiments, the disorder comprises NASH.

### B. Subjects

[0244] Some embodiments of the methods described herein include treatment of a subject. Non-limiting examples of subjects include vertebrates, animals, mammals, dogs, cats, cattle, rodents, mice, rats, primates, monkeys, and humans. In some embodiments, the subject is a vertebrate. In some embodiments, the subject is an animal. In some embodiments, the subject is a mammal. In some embodiments, the subject is a dog. In some embodiments, the subject is a cat. In some embodiments, the subject is a cattle. In some embodiments, the subject is a mouse. In some embodiments, the subject is a rat. In some embodiments, the subject is a primate. In some embodiments, the subject is a monkey. In some embodiments, the subject is an animal, a mammal, a dog, a cat, cattle, a rodent, a mouse, a rat, a primate, or a monkey. In some embodiments, the subject is a human.

[0245] In some embodiments, the subject is male. In some embodiments, the subject is female. In some embodiments, the subject is an adult (e.g. at least 18 years old).

[0246] In some embodiments, the subject has a body mass index (BMI) of 25, 26, 27, 28, 29, 30, 31, 32, 33, 34, 35, 36, 37, 38, 39, 40, 41, 42, 43, 44, 45, 46, 47, 48, 49, 50, or more, or a range defined by any two of the aforementioned integers. In some embodiments, the subject is overweight. In some embodiments, the subject has a BMI of 25 or more. In some embodiments, the subject has a BMI of 25-29. In some embodiments, the subject is obese. In some embodiments, the subject has a BMI of 30 or more. In some embodiments, the subject has a BMI of 30-39. In some embodiments, the subject has a BMI of 40-50. In some embodiments, the subject has a BMI of 25-50.

### C. Baseline Measurements

[0247] Some embodiments of the methods described herein include obtaining a baseline measurement from a subject. For example, in some embodiments, a baseline measurement is obtained from the subject prior to treating the subject. Non-limiting examples of baseline measurements include a baseline total cholesterol measurement, a baseline non-high density lipoprotein (HDL) cholesterol measurement, a baseline low density lipoprotein (LDL) measurement, a baseline triglyceride measurement, a baseline hemoglobin A1c measurement, a baseline Apolipoprotein B (APOB) measurement, a baseline glucose measurement, a baseline systolic blood pressure measurement, a baseline diastolic blood pressure measurement, a baseline alanine aminotransferase (ALT) measurement, a baseline aspartate aminotransferase (AST) measurement, a baseline blood alkaline phosphatase (ALP) measurement, a baseline gamma-glutamyl transferase (GGT) measurement, a baseline liver fibrosis score, a baseline nonalcoholic fatty liver disease (NAFLD) fibrosis score, a baseline NAFLD activity score, a baseline liver fat percentage measurement, a baseline HDL measurement, a baseline apolipoprotein A1 (ApoA1) measurement, a baseline insulin sensitivity measurement, a baseline left ventricular ejection fraction measurement, a baseline PLIN1 protein measurement, or a baseline PLIN1 mRNA measurement.

[0248] In some embodiments, the baseline measurement is obtained directly from the subject. In some embodiments, the baseline measurement is obtained by observation, for example by observation of the subject or of the subject's tissue. In some embodiments, the baseline measurement is obtained noninvasively using an imaging device.

[0249] In some embodiments, the baseline measurement is obtained in a sample from the subject. In some embodiments, the baseline measurement is obtained in one or more histological tissue sections. In some embodiments, the baseline measurement is obtained by performing an assay such as an immunoassay, a colorimetric assay, or a fluorescence assay, on the sample obtained from the subject. In some embodiments, the baseline measurement is obtained by an immunoassay, a colorimetric assay, a fluorescence assay, or a chromatography (e.g. HPLC) assay. In some embodiments, the baseline measurement is obtained by PCR.

[0250] In some embodiments, the baseline measurement is a baseline cholesterol measurement. In some embodiments, the baseline cholesterol concentration is a baseline total cholesterol measurement. In some embodiments, the baseline cholesterol concentration is a baseline non-high density lipoprotein (HDL) cholesterol measurement. In some embodiments, the baseline cholesterol concentration is a baseline low density lipoprotein (LDL) cholesterol measurement. In some embodiments, the baseline cholesterol measurement is a baseline cholesterol concentration. In some embodiments, the baseline cholesterol measurement is a baseline circulating cholesterol measurement. In some embodiments, the baseline cholesterol measurement is a baseline blood cholesterol measurement. In some embodiments, the baseline cholesterol measurement is obtained by an assay such as an immunoassay, a colorimetric assay, or a fluorescence assay.

[0251] In some embodiments, the baseline measurement is a baseline low density lipoprotein (LDL) measurement. In some embodiments, the baseline LDL measurement comprises a baseline very low density lipoprotein (VLDL) measurement. In some embodiments, the baseline LDL measurement is a baseline LDL concentration. In some embodiments, the baseline LDL measurement is a baseline circulating LDL measurement. In some embodiments, the baseline LDL measurement is a baseline blood LDL measurement. In some embodiments, the baseline LDL measurement is obtained by an assay such as an immunoassay, a colorimetric assay, or a fluorescence assay.

[0252] In some embodiments, the baseline measurement is a baseline high density lipoprotein (HDL) measurement. In some embodiments, the baseline HDL measurement is a baseline HDL concentration. In some embodiments, the baseline HDL measurement is a baseline circulating HDL measurement. In some embodiments, the baseline HDL measurement is a baseline blood HDL measurement. In some embodiments, the baseline HDL measurement is obtained by an assay such as an immunoassay, a colorimetric assay, or a fluorescence assay.

[0253] In some embodiments, the baseline measurement is a baseline apolipoprotein A1 (ApoA1) measurement. In some embodiments, the baseline ApoA1 measurement is a baseline ApoA1 concentration. In some embodiments, the baseline ApoA1 measurement is a baseline circulating ApoA1 measurement. In some embodiments, the baseline ApoA1 measurement is a baseline blood ApoA1 measurement. In some embodiments, the baseline ApoA1 measurement is obtained by an assay such as an immunoassay, a colorimetric assay, or a fluorescence assay.

[0254] In some embodiments, the baseline measurement is a baseline triglyceride measurement. In some embodiments, the baseline triglyceride measurement is a baseline triglyceride concentration (for example, mg/dL). In some embodiments, the baseline triglyceride measurement is a baseline circulating triglyceride measurement. In some embodiments, the baseline triglyceride measurement a baseline circulating triglyceride measurement above 150 mg/dL. In some embodiments, the baseline triglyceride measurement is obtained by an assay such as an immunoassay, a colorimetric assay, or a fluorescence assay.

[0255] In some embodiments, the baseline measurement is a baseline hemoglobin A1C measurement. In some embodiments, the baseline hemoglobin A1C measurement is a baseline hemoglobin A1C concentration. In some embodiments, the baseline hemoglobin A1C measurement is a baseline circulating hemoglobin A1C measurement. In some embodiments, the baseline hemoglobin A1C measurement is obtained by an assay such as an immunoassay, a colorimetric assay, a fluorescence assay, or HPLC. The baseline hemoglobin A1C measurement may be indicative of a healthy normal A1C measurement. The healthy normal hemoglobin A1C measurement may be below 48 mmol/mol (6.5 DCCT %). The healthy normal hemoglobin A1C measurement may be below 53 mmol/mol (7.0) DCCT %). The baseline hemoglobin A1C measurement may be indicative of diabetes of pre-diabetes. A baseline hemoglobin A1C measurement above 48 mmol/mol, or above 53 mmol/mol may indicate diabetes of pre-diabetes. The baseline hemoglobin A1C measurement may be indicative of diabetes. The baseline hemoglobin A1C measurement may be indicative of pre-diabetes. In some cases, the baseline hemoglobin A1C measurement is below 5.7 DCCT % (e.g. indicative of a normal healthy diagnosis). In some cases, the baseline hemoglobin A1C measurement is between 5.7 and 6.4 DCCT % (e.g. indicative of prediabetes). In some cases, the baseline hemoglobin A1C measurement is above 6.4 DCCT % (e.g. indicative of diabetes).

[0256] In some embodiments, the baseline measurement is a baseline apolipoprotein B (APOB) measurement. In some embodiments, the baseline APOB measurement is a baseline APOB concentration. In some embodiments, the baseline APOB measurement comprises a baseline APOB concentration. In some embodiments, the baseline APOB measurement is a baseline circulating APOB measurement. In some embodiments, the baseline APOB measurement is obtained by an assay such as an immunoassay, a colorimetric assay, or a fluorescence assay.

[0257] In some embodiments, the baseline measurement is a baseline glucose measurement. In some embodiments, the baseline glucose measurement is a baseline glucose concentration (for example, mg/dL). In some embodiments, the baseline glucose measurement comprises a baseline glucose concentration. In some embodiments, the baseline glucose measurement is a baseline circulating glucose measurement. In some embodiments, the baseline glucose measurement is obtained by an assay such as an immunoassay, a colorimetric assay, or a fluorescence assay.

[0258] In some embodiments, the baseline glucose measurement comprises a baseline glucose tolerance test. In some embodiments, the baseline glucose tolerance test comprises administering glucose to the subject, and then obtaining multiple baseline glucose measurements over time after administering the glucose to the subject. In some embodiments, the glucose is administered orally. In some embodiments, the glucose is administered by injection. In some embodiments, the multiple baseline glucose measurements are integrated into a baseline glucose area under the curve (AUC) measurement. In some embodiments, the baseline glucose tolerance test is performed on the subject in a fasted state such as after an overnight fast. In some embodiments, the baseline glucose measurement comprises a baseline glucose measurement other than a baseline glucose tolerance test.

[0259] In some embodiments, the baseline measurement is a baseline insulin measurement. In some embodiments, the baseline insulin measurement is a baseline insulin sensitivity measurement. In some embodiments, the baseline insulin sensitivity measurement is obtained using a glucose clamp technique such as a hyperinsulinemic euglycemic clamp. In some embodiments, the baseline insulin measurement is a baseline insulin concentration. In some embodiments, the baseline insulin measurement comprises a baseline insulin concentration. In some embodiments, the baseline insulin measurement is a baseline circulating insulin measurement. In some embodiments, the baseline insulin measurement is obtained by an assay such as an immunoassay (for example, an ELISA or an immunoblot), a colorimetric assay, or a fluorescence assay. In some embodiments, the baseline insulin sensitivity measurement comprises a baseline glucose tolerance test. In some embodiments, the baseline insulin sensitivity measurement comprises a baseline insulin sensitivity measurement other than a baseline glucose tolerance test.

[0260] In some embodiments, the baseline insulin measurement comprises a baseline insulin response test. In some embodiments, the baseline insulin response test comprises administering glucose to the subject and then obtaining multiple baseline insulin measurements over time after administering the glucose to the subject. In some embodiments, the glucose is administered orally. In some embodiments, the glucose is administered by injection. In some embodiments, the multiple baseline insulin measurements are integrated into a baseline insulin AUC measurement. In some embodiments, the baseline insulin response test is performed on the subject in a fasted state such as after an overnight fast.

[0261] In some embodiments, the baseline insulin measurement comprises a baseline glucose response test. In some embodiments, the baseline glucose response test comprises administering insulin to the subject, and then obtaining multiple baseline glucose measurements over time after administering the insulin to the subject. In some embodiments, the insulin is administered by injection. In some embodiments, the multiple baseline glucose measurements are integrated into a baseline glucose AUC measurement. In some embodiments, the multiple baseline glucose measurements are obtained with a glucometer. In some embodiments, the glucose response test is performed on the subject in a fasted state such as after an overnight fast. In some embodiments, the glucose response test is performed on the subject after administering food, drink or glucose to the subject.

[0262] Some embodiments of the methods described herein include obtaining the baseline measurement of the subject by measuring blood pressure (e.g. systolic or diastolic) with a sphygmomanometer in which a healthcare professional places a cuff around an arm of the subject and inflates the cuff with a pump until the circulation is cut off. A small valve slowly deflates the cuff, and the healthcare professional measures the pressure with the aid of a stethoscope that is placed over the arm of the subject in order to listen for the sound of the blood pulsing through the arteries. The first measurement in which blood rushes is the systolic blood pressure (SBP), and after the sound fades, the second number indicates the diastolic blood pressure (DBP), which is a measure the blood pressure of the heart at rest. The mean arterial pressure (MAP) is an average blood pressure of the subject during a single cardiac cycle. The MAP can be measured directly using methods such as applanation tonometry or it can be approximated by using a formula in which the diastolic blood pressure is doubled and added to the systolic blood pressure and that composite sum is then divided by 3 to estimate MAP.

[0263] In some embodiments, the baseline measurement is a baseline systolic blood (SBP) pressure measurement. In some embodiments, the baseline SBP measurement is measured in mm of mercury (mm Hg). In some embodiments, the SBP measurement is obtained with a sphygmomanometer. The baseline SBP measurement may be indicative of normal blood pressure. For most adults, normal SBP at rest is within the range of 100-130 mmHg. For most adults, hypertension is present if the resting blood pressure is persistently at or above 130/80 or 140/90 mmHg. The baseline SBP measurement may be indicative of hypertension (e.g. at least 130 mmHg, or at least 140 mmHg). The baseline SBP measurement may include a baseline cerebral SBP measurement.

[0264] In some embodiments, the baseline measurement is a baseline diastolic blood (DBP) pressure measurement. In some embodiments, the baseline DBP measurement is measured in mm Hg. In some embodiments, the DBP measurement is obtained with a sphygmomanometer. The baseline DBP measurement may be indicative of normal blood pressure. For most adults, normal DBP at rest is within the range of 60-80 mmHg. The baseline DBP measurement may be indicative of hypertension (e.g. at least 80 mmHg, or at least 90 mmHg). The baseline DBP measurement may include a baseline cerebral DBP measurement.

[0265] In some embodiments, the baseline measurement is a baseline systolic heart function measurement. A baseline heart systolic function measurement may include a measure of heart pumping capacity. An example of a baseline systolic function measurement includes a baseline ejection fraction measurement. A baseline ejection fraction measurement may include a baseline left ventricular ejection fraction measurement, a baseline right ventricular ejection fraction measurement, a baseline left atrial ejection fraction measurement, or a baseline right atrial ejection fraction measurement. In some embodiments, the baseline ejection fraction measurement includes a baseline left ventricular ejection fraction measurement. A subject with heart failure, for example, may have a left ventricular ejection fraction below 60%, below 50%, below 40%, below 30%, below 20%, or below: 10%. In some embodiments, a baseline left ventricular ejection fraction below 35% is indicative of systolic dysfunction. Another example of a baseline systolic heart function measurement is a baseline cardiac output measurement. The baseline systolic heart function measurement may be measured using a medical imaging device such as an ultrasound (e.g., an echocardiography device) or magnetic resonance imaging device.

[0266] In some embodiments, the baseline measurement is a baseline liver enzyme measurement. In some embodiments, the baseline liver enzyme measurement is a baseline alanine aminotransferase (ALT) measurement. In some embodiments, the baseline liver enzyme measurement is a baseline aspartate aminotransferase (AST) measurement. In some embodiments, the baseline liver enzyme measurement comprises an ALT/AST ratio, or comprises an AST/ALT ratio.

[0267] In some embodiments, the baseline measurement is a baseline alanine aminotransferase (ALT) measurement. In some embodiments, the baseline ALT measurement is a baseline ALT concentration (for example. Units/dL). In some embodiments, the baseline ALT measurement is a baseline blood ALT measurement, for example, a baseline blood, serum, or plasma ALT level. In some embodiments, the baseline ALT measurement is obtained by an assay such as an immunoassay, a colorimetric assay, or a fluorescence assay.

[0268] In some embodiments, the baseline measurement is a baseline aspartate aminotransferase (AST) measurement. In some embodiments, the baseline AST measurement is a baseline AST concentration (for example. Units/L). In some embodiments, the baseline AST measurement is a baseline blood AST measurement, for example, a baseline blood, serum, or plasma AST level. In some embodiments, the baseline AST measurement is obtained by an assay such as an immunoassay, a colorimetric assay, or a fluorescence assay.

[0269] In some embodiments, the baseline measurement is a baseline alkaline phosphatase (ALP) measurement. In some embodiments, the baseline ALP measurement is a baseline ALP concentration. In some embodiments, the baseline ALP measurement is a baseline blood ALP measurement. In some embodiments, the baseline ALP measurement is obtained by an assay such as an immunoassay, a colorimetric assay, a chromatography assay, or a fluorescence assay.

[0270] In some embodiments, the baseline measurement is a baseline gamma-glutamyl transferase (GGT) measurement. In some embodiments, the baseline GGT measurement is a baseline GGT concentration. In some embodiments, the baseline GGT measurement is a baseline blood GGT measurement. In some embodiments, the baseline GGT measurement is obtained by an assay such as an immunoassay, a colorimetric assay, a chromatography assay, or a fluorescence assay.

[0271] In some embodiments, the baseline measurement is a baseline liver fibrosis measurement. In some embodiments, the baseline liver fibrosis measurement is a baseline liver fibrosis score (LFS). In some embodiments, the baseline LFS comprises a score of 0, 1, 2, 3, or 4, or a range of scores defined by any two of the aforementioned numbers. In some embodiments, the baseline LFS comprises a score of 0-4. In some embodiments, the baseline LFS is obtained using a scoring system exemplified in Table 2. In some embodiments, the baseline LFS measurement is obtained noninvasively. In some embodiments, the baseline LFS measurement is obtained by a medical imaging device such as a vibration-controlled transient elastography (VCTE) device, a shear wave elastography device, a medical resonance imaging (MRI) device, a magnetic resonance spectroscopy device, a computed tomography device, or an ultrasound device. In some embodiments, the baseline LFS measurement is obtained in a liver sample. In some embodiments, the baseline LFS is obtained by an assay such as an immunoassay, a colorimetric assay, or a fluorescence assay. In some embodiments, the baseline LFS is obtained using one or more indirect markers or measures of liver fibrosis such as an aspartate aminotransferase-to-platelet ratio index (APRI), a Fibrosis-4 (FIB-4) index, a FibroIndex, a Forns Index, a Hepascore, or a FibroTest. In some embodiments, the baseline LFS is obtained using one or more indirect markers or measures of liver fibrosis such as a FIBROSpect test or a FIBROSpect II test. In some embodiments, the baseline LFS is obtained by RT-qPCR or RNA sequencing of one or more fibrosis-related genes such as a collagen gene. In some embodiments, the baseline LFS or the baseline LFS is obtained using a scoring system upon a visual inspection of a sample such as a histological sample. In some embodiments, the baseline LFS or the baseline LFS is obtained using a stain with an affinity to collagen.

TABLE 2
Non-Limiting Examples of Liver Fibrosis Scoring Systems

| Score | IASL | Batts-Ludwig | Metavir |
|---|---|---|---|
| 0 | No fibrosis | No fibrosis | No fibrosis |
| 1 | Mild fibrosis | Fibrous portal | Periportal fibrotic |
| | | expansion | expansion |
| 2 | Moderate fibrosis | Rare bridges or | Periportal septae |
| | | septae | (>1 septum) |
| 3 | Severe fibrosis | Numerous bridges | Portal-central septae |
| | | or septae | |
| 4 | Cirrhosis | Cirrhosis | Cirrhosis |

[0272] In some embodiments, the baseline liver fibrosis measurement is a baseline nonalcoholic fatty liver disease (NAFLD) fibrosis score. A baseline NAFLD fibrosis score may take into account laboratory test values such as platelet count, albumin, and AST/ALT ratio, and patient characteristics such as BMI, and diabetes status. A baseline NAFLD fibrosis score below −1.455 may be indicative of no fibrosis, mild fibrosis, or moderate fibrosis. A baseline NAFLD fibrosis score between-1.455 and 0.675 may be indicative of severe fibrosis. A baseline NAFLD fibrosis score above 0.675 may be indicative of cirrhosis.

[0273] In some embodiments, the baseline measurement is a baseline non-alcoholic fatty liver disease (NAFLD) activity score. In some embodiments, the baseline NAFLD activity score comprises a numerical value such as a number of points. In some embodiments, the numerical value is 0, 1, 2, 3, 4, 5, 6, 7, or 8, or a range defined by any two of the aforementioned numerical values. In some embodiments, the numerical value is 0-8. In some embodiments, the baseline NAFLD activity score comprises a steatosis grade such as a baseline liver fat percentage. In some embodiments, a steatosis grade <5% comprises 0 points in the baseline NAFLD activity score. In some embodiments, a steatosis grade of 5-33% comprises 1 point in the baseline NAFLD activity score. In some embodiments, a steatosis grade of 34-66% comprises 2 points in the baseline NAFLD activity score. In some embodiments, a steatosis grade of >66% comprises 3 points in the baseline NAFLD activity score. In some embodiments, the baseline NAFLD activity score comprises a lobular inflammation grade. In some embodiments, the lobular inflammation grade comprises an assessment of inflammatory foci. In some embodiments, a lobular inflammation grade comprising 0 foci comprises 0 points in the baseline NAFLD activity score. In some embodiments, a lobular inflammation grade comprising 1 focus per a field (such as a 20× field or a 200× field) comprises 1 point in the baseline NAFLD activity score. In some embodiments, a lobular inflammation grade comprising 2-4 foci per field comprises 2 points in the baseline NAFLD activity score. In some embodiments, a lobular inflammation grade comprising >4 foci per field comprises 3 points in the baseline NAFLD activity score. In some embodiments, the baseline NAFLD activity score comprises a liver cell injury grade such as an amount of ballooning cells. In some embodiments, a liver cell injury comprising no ballooning cells comprises 0 points in the baseline NAFLD activity score. In some embodiments, a liver cell injury comprising some new balloon cells comprises 1 points in the baseline NAFLD activity score. In some embodiments, a liver cell injury comprising many ballooning cells or prominent ballooning comprises 2 points in the baseline NAFLD activity score. In some embodiments, the baseline NAFLD activity score is obtained invasively, based on histology, and/or in a liver biopsy.

[0274] In some embodiments, the baseline measurement is a baseline liver steatosis measurement. In some embodiments, the baseline liver steatosis measurement is a baseline liver fat percentage (LFP) measurement. In some embodiments, the baseline measurement is a baseline LFP measurement. In some embodiments, the baseline LFP measurement is indicated as a mass/mass percentage of fat/total tissue. In some embodiments, the baseline LFP measurement is indicated as a mass/volume percentage of fat/total tissue. In some embodiments, the baseline LFP measurement is indicated as a volume/mass percentage of fat/total tissue. In some embodiments, the baseline LFP measurement is indicated as a volume/volume percentage of fat/total tissue. In some embodiments, the baseline LFP measurement is indicated as a score. In some embodiments, the baseline LFP measurement is obtained noninvasively. In some embodiments, the baseline LFP measurement is obtained by a medical imaging device. In some embodiments, the baseline LFP measurement is obtained by a device such as a medical resonance imaging (MRI) device, a magnetic resonance spectroscopy device a computed tomography device, a controlled attenuation parameter (CAP), a transient elastography device, or an ultrasound device. In some embodiments, the baseline LFP measurement is obtained in a liver sample. In some embodiments, the baseline LFP measurement comprises a baseline liver triglyceride measurement. In some embodiments, the baseline LFP measurement is obtained by an assay such as an immunoassay, a colorimetric assay, or a fluorescence assay. In some embodiments, the baseline LFP measurement or the baseline LFP measurement is obtained using a scoring system upon a visual inspection of a sample such as a histological sample. In some embodiments, the baseline LFP measurement or the baseline LFP measurement is obtained using a stain with an affinity to fats, such as a lysochrome diazo dye.

[0275] In some embodiments, the baseline measurement is a baseline PLIN1 protein measurement. In some embodiments, the baseline PLIN1 protein measurement comprises a baseline PLIN1 protein level. In some embodiments, the baseline PLIN1 protein level is indicated as a mass or percentage of PLIN1 protein per sample weight. In some embodiments, the baseline PLIN1 protein level is indicated as a mass or percentage of PLIN1 protein per sample volume. In some embodiments, the baseline PLIN1 protein level is indicated as a mass or percentage of PLIN1 protein per total protein within the sample. In some embodiments, the baseline PLIN1 protein measurement is a baseline tissue PLIN1 protein measurement. In some embodiments, the baseline PLIN1 protein measurement is obtained by an assay such as an immunoassay, a colorimetric assay, or a fluorescence assay.

[0276] In some embodiments, the baseline measurement is a baseline PLIN1 mRNA measurement. In some embodiments, the baseline PLIN1 mRNA measurement comprises a baseline PLIN1 mRNA level. In some embodiments, the baseline PLIN1 mRNA level is indicated as an amount or percentage of PLIN1 mRNA per sample weight. In some embodiments, the baseline PLIN1 mRNA level is indicated as an amount or percentage of PLIN1 mRNA per sample volume. In some embodiments, the baseline PLIN1 mRNA level is indicated as an amount or percentage of PLIN1 mRNA per total mRNA within the sample. In some embodiments, the baseline PLIN1 mRNA level is indicated as an amount or percentage of PLIN1 mRNA per total nucleic acids within the sample. In some embodiments, the baseline PLIN1 mRNA level is indicated relative to another mRNA level, such as an mRNA level of a housekeeping gene, within the sample. In some embodiments, the baseline PLIN1 mRNA measurement is a baseline tissue PLIN1 mRNA measurement. In some embodiments, the baseline PLIN1 mRNA measurement is obtained by an assay such as a polymerase chain reaction (PCR) assay. In some embodiments, the PCR comprises quantitative PCR (qPCR). In some embodiments, the PCR comprises reverse transcription of the PLIN1 mRNA.

[0277] Some embodiments of the methods described herein include obtaining a sample from a subject. In some embodiments, the baseline measurement is obtained in a sample obtained from the subject. In some embodiments, the sample is obtained from the subject prior to administration or treatment of the subject with a composition described herein. In some embodiments, a baseline measurement is obtained in a sample obtained from the subject prior to administering the composition to the subject. In some embodiments, the sample is obtained from the subject in a fasted state. In some embodiments, the sample is obtained from the subject after an overnight fasting period. In some embodiments, the sample is obtained from the subject in a fed state.

[0278] In some embodiments, the sample comprises a fluid. In some embodiments, the sample is a fluid sample. In some embodiments, the sample is a blood, plasma, or serum sample. In some embodiments, the sample comprises blood. In some embodiments, the sample is a blood sample. In some embodiments, the sample is a whole-blood sample. In some embodiments, the blood is fractionated or centrifuged. In some embodiments, the sample comprises plasma. In some embodiments, the sample is a plasma sample. A blood sample may be a plasma sample. In some embodiments, the sample comprises serum. In some embodiments, the sample is a serum sample. A blood sample may be a serum sample.

[0279] In some embodiments, the sample comprises a tissue. In some embodiments, the sample is a tissue sample. In some embodiments, the tissue comprises adipose, liver, brain, vascular, or heart tissue. For example, the baseline PLIN1 mRNA measurement, or the baseline PLIN1 protein measurement, may be obtained in a adipose or liver sample obtained from the patient. In some embodiments, the tissue comprises adipose tissue. In some embodiments, the adipose tissue comprises white adipose tissue. The adipose tissue may include adipocytes. In some embodiments, the tissue comprises liver tissue. The liver may include hepatocytes. In some embodiments, the tissue comprises brain tissue. In some embodiments, the tissue comprises vascular tissue. In some embodiments, the tissue comprises heart tissue. The heart tissue may include cardiomyocytes.

[0280] In some embodiments, the sample includes cells. In some embodiments, the sample comprises a cell. In some embodiments, the cell comprises an adipose cell, a liver cell, a brain cell, a vasculature cell, or a heart cell. In some embodiments, the cell is an adipose cell. In some embodiments, the adipose cell is an adipocyte. In some embodiments, the cell is a liver cell. In some embodiments, the liver cell is a hepatocyte. In some embodiments, the cell is a brain cell. In some embodiments, the cell is a vasculature cell. In some embodiments, the cell is a heart cell. In some embodiments, the heart cell is a cardiomyocyte.

### D. Effects

[0281] In some embodiments, the composition or administration of the composition affects a measurement such as a total cholesterol measurement, a non-high density lipoprotein (HDL) cholesterol measurement, a low density lipoprotein (LDL) measurement, a triglyceride measurement, a hemoglobin A1c measurement, a glucose measurement, an APOB measurement, a systolic blood pressure measurement, a diastolic blood pressure measurement, an alanine aminotransferase (ALT) measurement, an aspartate aminotransferase (AST) measurement, a blood alkaline phosphatase (ALP) measurement, a gamma-glutamyl transferase (GGT) measurement, a liver fibrosis score, a nonalcoholic fatty liver disease (NAFLD) fibrosis score, an NAFLD activity score, a liver fat percentage measurement, an HDL measurement, an apolipoprotein A1 (ApoA1) measurement, an insulin sensitivity measurement, a left ventricular ejection fraction measurement, an PLIN1 protein measurement, or an PLIN1 mRNA measurement, relative to the baseline measurement.

[0282] Some embodiments of the methods described herein include obtaining the measurement from a subject. For example, the measurement may be obtained from the subject after treating the subject. In some embodiments, the measurement is obtained in a second sample (such as a fluid or tissue sample described herein) obtained from the subject after the composition is administered to the subject. In some embodiments, the measurement is an indication that the disorder has been treated.

[0283] In some embodiments, the measurement is obtained directly from the subject. In some embodiments, the measurement is obtained noninvasively using an imaging device. In some embodiments, the measurement is obtained in a second sample from the subject. In some embodiments, the measurement is obtained in one or more histological tissue sections. In some embodiments, the measurement is obtained by performing an assay on the second sample obtained from the subject. In some embodiments, the measurement is obtained by an assay, such as an assay described herein. In some embodiments, the assay is an immunoassay, a colorimetric assay, a fluorescence assay, a chromatography (e.g. HPLC) assay, or a PCR assay. In some embodiments, the measurement is obtained by an assay such as an immunoassay, a colorimetric assay, a fluorescence assay, or a chromatography (e.g. HPLC) assay. In some embodiments, the measurement is obtained by PCR. In some embodiments, the measurement is obtained by histology. In some embodiments, the measurement is obtained by observation. In some embodiments, additional measurements are made, such as in a 3rd sample, a 4th sample, or a fifth sample.

[0284] In some embodiments, the measurement is obtained within 1 hour, within 2 hours, within 3 hours, within 4 hours, within 5 hours, within 6 hours, within 12 hours, within 18 hours, or within 24 hours after the administration of the composition. In some embodiments, the measurement is obtained within 1 day, within 2 days, within 3 days, within 4 days, within 5 days, within 6 days, or within 7 days after the administration of the composition. In some embodiments, the measurement is obtained within 1 week, within 2 weeks, within 3 weeks, within 1 month, within 2 months, within 3 months, within 6 months, within 1 year, within 2 years, within 3 years, within 4 years, or within 5 years after the administration of the composition. In some embodiments, the measurement is obtained after 1 hour, after 2 hours, after 3 hours, after 4 hours, after 5 hours, after 6 hours, after 12 hours, after 18 hours, or after 24 hours after the administration of the composition. In some embodiments, the measurement is obtained after 1 day, after 2 days, after 3 days, after 4 days, after 5 days, after 6 days, or after 7 days after the administration of the composition. In some embodiments, the measurement is obtained after 1 week, after 2 weeks, after 3 weeks, after 1 month, after 2 months, after 3 months, after 6 months, after 1 year, after 2 years, after 3 years, after 4 years, or after 5 years, following the administration of the composition.

[0285] In some embodiments, the composition reduces the measurement relative to the baseline measurement. For example, an adverse phenotype of a cardiometabolic disorder may be reduced upon administration of the composition. In some embodiments, the reduction is measured in a second sample obtained from the subject after administering the composition to the subject. In some embodiments, the reduction is measured directly in the subject after administering the composition to the subject. In some embodiments, the measurement is decreased by about 2.5% or more, about 5% or more, or about 7.5% or more, relative to the baseline measurement. In some embodiments, the measurement is decreased by about 10% or more, relative to the baseline measurement. In some embodiments, the measurement is decreased by about 20% or more, about 30% or more, about 40% or more, about 50% or more, about 60% or more, about 70% or more, about 80% or more, about 90% or more, relative to the baseline measurement. In some embodiments, the measurement is decreased by no more than about 2.5%, no more than about 5%, or no more than about 7.5%, relative to the baseline measurement. In some embodiments, the measurement is decreased by no more than about 10%, relative to the baseline measurement. In some embodiments, the measurement is decreased by no more than about 20%, no more than about 30%, no more than about 40%, no more than about 50%, no more than about 60%, no more than about 70%, no more than about 80%, no more than about 90%, or no more than about 100% relative to the baseline measurement. In some embodiments, the measurement is decreased by 2.5%, 5%, 7.5%, 10%, 20%, 30%, 40%, 50%, 60%, 70%, 80%, 90%, or 100%, or by a range defined by any of the two aforementioned percentages.

[0286] In some embodiments, the composition increases the measurement relative to the baseline measurement. For example, a protective cardiometabolic phenotype may be increased upon administration of the composition. In some embodiments, the increase is measured in a second sample obtained from the subject after administering the composition to the subject. In some embodiments, the increase is measured directly in the subject after administering the composition to the subject. In some embodiments, the measurement is increased by about 2.5% or more, about 5% or more, or about 7.5% or more, relative to the baseline measurement. In some embodiments, the measurement is increased by about 10% or more, relative to the baseline measurement. In some embodiments, the measurement is increased by about 20% or more, about 30% or more, about 40% or more, about 50% or more, about 60% or more, about 70% or more, about 80% or more, about 90% or more, relative to the baseline measurement. In some embodiments, the measurement is increased by about 100% or more, increased by about 250% or more, increased by about 500% or more, increased by about 750% or more, or increased by about 1000% or more, relative to the baseline measurement. In some embodiments, the measurement is increased by no more than about 2.5%, no more than about 5%, or no more than about 7.5%, relative to the baseline measurement. In some embodiments, the measurement is increased by no more than about 10%, relative to the baseline measurement. In some embodiments, the measurement is increased by no more than about 20%, no more than about 30%, no more than about 40%, no more than about 50%, no more than about 60%, no more than about 70%, no more than about 80%, no more than about 90%, or no more than about 100% relative to the baseline measurement. In some embodiments, the measurement is increased by no more than about 100%, increased by no more than about 250%, increased by no more than about 500%, increased by no more than about 750%, or increased by no more than about 1000%, relative to the baseline measurement. In some embodiments, the measurement is increased by 2.5%, 5%, 7.5%, 10%, 20%, 30%, 40%, 50%, 60%, 70%, 80%, 90%, 100%, 250%, 500%, 750%, or 1000%, or by a range defined by any of the two aforementioned percentages.

[0287] In some embodiments, the measurement is a cholesterol measurement. In some embodiments, the cholesterol concentration is a total cholesterol measurement. In some embodiments, the cholesterol concentration is a non-high density lipoprotein (HDL) cholesterol measurement. In some embodiments, the cholesterol concentration is a low density lipoprotein (LDL) cholesterol measurement. In some embodiments, the cholesterol measurement is a cholesterol concentration. In some embodiments, the cholesterol measurement is a circulating cholesterol measurement. In some embodiments, the cholesterol measurement is a blood cholesterol measurement. In some embodiments, the cholesterol measurement is obtained by an assay such as an immunoassay, a colorimetric assay, or a fluorescence assay.

[0288] In some embodiments, the composition reduces the cholesterol measurement relative to the baseline cholesterol measurement. In some embodiments, the reduction is measured in a second sample obtained from the subject after administering the composition to the subject. In some embodiments, the cholesterol measurement is decreased by about 2.5% or more, about 5% or more, or about 7.5% or more, relative to the baseline cholesterol measurement. In some embodiments, the cholesterol measurement is decreased by about 10% or more, relative to the baseline cholesterol measurement. In some embodiments, the cholesterol measurement is decreased by about 20% or more, about 30)% or more, about 40% or more, about 50% or more, about 60% or more, about 70% or more, about 80% or more, about 90% or more, relative to the baseline cholesterol measurement. In some embodiments, the cholesterol measurement is decreased by no more than about 2.5%, no more than about 5%, or no more than about 7.5%, relative to the baseline cholesterol measurement. In some embodiments, the cholesterol measurement is decreased by no more than about 10%, relative to the baseline cholesterol measurement. In some embodiments, the cholesterol measurement is decreased by no more than about 20%, no more than about 30%, no more than about 40%, no more than about 50%, no more than about 60%, no more than about 70%, no more than about 80%, or no more than about 90%, relative to the baseline cholesterol measurement. In some embodiments, the cholesterol measurement is decreased by 2.5%, 5%, 7.5%, 10%, 20%, 30%, 40%, 50%, 60%, 70%, 80%, or 90%, or by a range defined by any of the two aforementioned percentages.

[0289] In some embodiments, the measurement is a low density lipoprotein (LDL) measurement. In some embodiments, the LDL measurement comprises a very low density lipoprotein (VLDL) measurement. In some embodiments, the LDL measurement is a LDL concentration. In some embodiments, the LDL measurement is a circulating LDL measurement. In some embodiments, the LDL measurement is a blood LDL measurement. In some embodiments, the LDL measurement is obtained by an assay such as an immunoassay, a colorimetric assay, or a fluorescence assay.

[0290] In some embodiments, the composition reduces the LDL measurement relative to the baseline LDL measurement. In some embodiments, the reduction is measured in a second sample obtained from the subject after administering the composition to the subject. In some embodiments, the LDL measurement is decreased by about 2.5% or more, about 5% or more, or about 7.5% or more, relative to the baseline LDL measurement. In some embodiments, the LDL measurement is decreased by about 10% or more, relative to the baseline LDL measurement. In some embodiments, the LDL measurement is decreased by about 20% or more, about 30% or more, about 40% or more, about 50% or more, about 60% or more, about 70% or more, about 80% or more, about 90% or more, relative to the baseline LDL measurement. In some embodiments, the LDL measurement is decreased by no more than about 2.5%, no more than about 5%, or no more than about 7.5%, relative to the baseline LDL measurement. In some embodiments, the LDL measurement is decreased by no more than about 10%, relative to the baseline LDL measurement. In some embodiments, the LDL measurement is decreased by no more than about 20%, no more than about 30%, no more than about 40%, no more than about 50%, no more than about 60%, no more than about 70%, no more than about 80%, or no more than about 90%, relative to the baseline LDL measurement. In some embodiments, the LDL measurement is decreased by 2.5%, 5%, 7.5%, 10%, 20%, 30%, 40%, 50%, 60%, 70%, 80%, or 90%, or by a range defined by any of the two aforementioned percentages.

[0291] In some embodiments, the measurement is a high density lipoprotein (HDL) measurement. In some embodiments, the HDL measurement is an HDL concentration. In some embodiments, the HDL measurement is a circulating HDL measurement. In some embodiments, the HDL measurement is a blood HDL measurement. In some embodiments, the HDL measurement is obtained by an assay such as an immunoassay, a colorimetric assay, or a fluorescence assay.

[0292] In some embodiments, the composition increases the HDL measurement relative to the baseline HDL measurement. In some embodiments, the increase is measured in a second sample obtained from the subject after administering the composition to the subject. In some embodiments, the HDL measurement is increased by about 2.5% or more, about 5% or more, or about 7.5% or more relative to the baseline HDL measurement. In some embodiments, the HDL measurement is increased by about 10% or more, relative to the baseline HDL measurement. In some embodiments, the HDL measurement is increased by about 20% or more, about 30% or more, about 40% or more, about 50% or more, about 60% or more, about 70% or more, about 80% or more, about 90% or more, relative to the baseline HDL measurement. In some embodiments, the HDL measurement is increased by about 100% or more, increased by about 250% or more, increased by about 500% or more, increased by about 750% or more, or increased by about 1000% or more, relative to the baseline HDL measurement. In some embodiments, the HDL measurement is increased by no more than about 2.5%, no more than about 5%, or no more than about 7.5%, relative to the baseline HDL measurement. In some embodiments, the HDL measurement is increased by no more than about 10%, relative to the baseline HDL measurement. In some embodiments, the HDL measurement is increased by no more than about 20%, no more than about 30%, no more than about 40%, no more than about 50%, no more than about 60%, no more than about 70%, no more than about 80%, no more than about 90%, or no more than about 100% relative to the baseline HDL measurement. In some embodiments, the HDL measurement is increased by no more than about 100%, increased by no more than about 250%, increased by no more than about 500%, increased by no more than about 750%, or increased by no more than about 1000%, relative to the baseline HDL measurement. In some embodiments, the HDL measurement is increased by 2.5%, 5%, 7.5%, 10%, 20%, 30%, 40%, 50%, 60%, 70%, 80%, 90%, 100%, 250%, 500%, 750%, or 1000%, or by a range defined by any of the two aforementioned percentages.

[0293] In some embodiments, the measurement is a apolipoprotein A1 (ApoA1) measurement. In some embodiments, the ApoA1 measurement is an ApoA1 concentration. In some embodiments, the ApoA1 measurement is a circulating ApoA1 measurement. In some embodiments, the ApoA1 measurement is a blood ApoA1 measurement. In some embodiments, the ApoA1 measurement is obtained by an assay such as an immunoassay, a colorimetric assay, or a fluorescence assay.

[0294] In some embodiments, the composition increases the ApoA1 measurement relative to the baseline ApoA1 measurement. In some embodiments, the increase is measured in a second sample obtained from the subject after administering the composition to the subject. In some embodiments, the ApoA1 measurement is increased by about 2.5% or more, about 5% or more, or about 7.5% or more, relative to the baseline ApoA1 measurement. In some embodiments, the ApoA1 measurement is increased by about 10% or more, relative to the baseline ApoA1 measurement. In some embodiments, the ApoA1 measurement is increased by about 20% or more, about 30% or more, about 40% or more, about 50% or more, about 60% or more, about 70% or more, about 80% or more, about 90% or more, relative to the baseline ApoA1 measurement. In some embodiments, the ApoA1 measurement is increased by about 100% or more, increased by about 250% or more, increased by about 500% or more, increased by about 750% or more, or increased by about 1000% or more, relative to the baseline ApoA1 measurement. In some embodiments, the ApoA1 measurement is increased by no more than about 2.5%, no more than about 5%, or no more than about 7.5%, relative to the baseline ApoA1 measurement. In some embodiments, the ApoA1 measurement is increased by no more than about 10%, relative to the baseline ApoA1 measurement. In some embodiments, the ApoA1 measurement is increased by no more than about 20%, no more than about 30%, no more than about 40%, no more than about 50%, no more than about 60%, no more than about 70%, no more than about 80%, no more than about 90%, or no more than about 100% relative to the baseline ApoA1 measurement. In some embodiments, the ApoA1 measurement is increased by no more than about 100%, increased by no more than about 250%, increased by no more than about 500%, increased by no more than about 750%, or increased by no more than about 1000%, relative to the baseline ApoA1 measurement. In some embodiments, the ApoA1 measurement is increased by 2.5%, 5%, 7.5%, 10%, 20%, 30%, 40%, 50%, 60%, 70%, 80%, 90%, 100%, 250%, 500%, 750%, or 1000%, or by a range defined by any of the two aforementioned percentages.

[0295] In some embodiments, the measurement is a triglyceride measurement. In some embodiments, the triglyceride measurement is a triglyceride concentration (for example, mg/dL). In some embodiments, the triglyceride measurement is a circulating triglyceride measurement. In some embodiments, the triglyceride measurement is obtained by an assay such as an immunoassay, a colorimetric assay, or a fluorescence assay.

[0296] In some embodiments, the composition reduces the triglyceride measurement relative to the baseline triglyceride measurement. In some embodiments, the composition reduces circulating triglycerides relative to the baseline triglyceride measurement. In some embodiments, the reduced triglycerides are measured in a second sample obtained from the subject after administering the composition to the subject. In some embodiments, the triglyceride measurement is decreased by about 2.5% or more, about 5% or more, or about 7.5% or more, relative to the baseline triglyceride measurement. In some embodiments, the triglyceride measurement is decreased by about 10% or more, relative to the baseline triglyceride measurement. In some embodiments, the triglyceride measurement is decreased by about 20% or more, about 30% or more, about 40% or more, about 50% or more, about 60% or more, about 70% or more, about 80% or more, about 90% or more, or about 100%, relative to the baseline triglyceride measurement. In some embodiments, the triglyceride measurement is decreased by no more than about 2.5%, no more than about 5%, or no more than about 7.5%, relative to the baseline triglyceride measurement. In some embodiments, the triglyceride measurement is decreased by no more than about 10%, relative to the baseline triglyceride measurement. In some embodiments, the triglyceride measurement is decreased by no more than about 20%, no more than about 30%, no more than about 40%, no more than about 50%, no more than about 60%, no more than about 70%, no more than about 80%, no more than about 90%, or no more than about 100% relative to the baseline triglyceride measurement. In some embodiments, the triglyceride measurement is decreased by 2.5%, 5%, 7.5%, 10%, 20%, 30%, 40%, 50%, 60%, 70%, 80%, 90%, 100%, or by a range defined by any of the two aforementioned percentages.

[0297] In some embodiments, the measurement is a hemoglobin A1C measurement. In some embodiments, the hemoglobin A1C measurement is a hemoglobin A1C concentration. In some embodiments, the hemoglobin A1C measurement is a circulating hemoglobin A1C measurement. In some embodiments, the hemoglobin A1C measurement is obtained by an assay such as an immunoassay, a colorimetric assay, a fluorescence assay, or HPLC. The hemoglobin A1C measurement may be indicative of a healthy normal A1C measurement. The hemoglobin A1C measurement may be indicative of diabetes. The hemoglobin A1C measurement may be indicative of pre-diabetes.

[0298] In some embodiments, the composition reduces the hemoglobin A1C measurement relative to the baseline hemoglobin A1C measurement. In some embodiments, the reduction is measured in a second fluid sample obtained from the subject after administering the composition to the subject. In some embodiments, the reduction is measured directly in the subject after administering the composition to the subject. In some embodiments, the hemoglobin A1C measurement is decreased by about 2.5% or more, about 5% or more, or about 7.5% or more, relative to the baseline hemoglobin A1C measurement. In some embodiments, the hemoglobin A1C measurement is decreased by about 10% or more, relative to the baseline hemoglobin A1C measurement. In some embodiments, the hemoglobin A1C measurement is decreased by about 20% or more, about 30% or more, about 40% or more, about 50% or more, about 60% or more, about 70% or more, about 80% or more, about 90% or more, relative to the baseline hemoglobin A1C measurement. In some embodiments, the hemoglobin A1C measurement is decreased by no more than about 2.5%, no more than about 5%, or no more than about 7.5%, relative to the baseline hemoglobin A1C measurement. In some embodiments, the hemoglobin A1C measurement is decreased by no more than about 10%, relative to the baseline hemoglobin A1C measurement. In some embodiments, the hemoglobin A1C measurement is decreased by no more than about 20%, no more than about 30%, no more than about 40%, no more than about 50%, no more than about 60%, no more than about 70%, no more than about 80%, or no more than about 90% relative to the baseline hemoglobin A1C measurement. In some embodiments, the hemoglobin A1C measurement is decreased by 2.5%, 5%, 7.5%, 10%, 20%, 30%, 40%, 50%, 60%, 70%, 80%, or 90%, or by a range defined by any of the two aforementioned percentages.

[0299] In some embodiments, the measurement is a apolipoprotein B (APOB) measurement. In some embodiments, the APOB measurement is a APOB concentration. In some embodiments, the APOB measurement comprises a APOB concentration. In some embodiments, the APOB measurement is a circulating APOB measurement. In some embodiments, the APOB measurement is obtained by an assay such as an immunoassay, a colorimetric assay, or a fluorescence assay.

[0300] In some embodiments, the composition reduces the APOB measurement relative to the baseline APOB measurement. In some embodiments, the reduction is measured in a second fluid sample obtained from the subject after administering the composition to the subject. In some embodiments, the reduction is measured directly in the subject after administering the composition to the subject. In some embodiments, the APOB measurement is decreased by about 2.5% or more, about 5% or more, or about 7.5% or more, relative to the baseline APOB measurement. In some embodiments, the APOB measurement is decreased by about 10% or more, relative to the baseline APOB measurement. In some embodiments, the APOB measurement is decreased by about 20% or more, about 30% or more, about 40% or more, about 50% or more, about 60% or more, about 70% or more, about 80% or more, about 90% or more, relative to the baseline APOB measurement. In some embodiments, the APOB measurement is decreased by no more than about 2.5%, no more than about 5%, or no more than about 7.5%, relative to the baseline APOB measurement. In some embodiments, the APOB measurement is decreased by no more than about 10%, relative to the baseline APOB measurement. In some embodiments, the APOB measurement is decreased by no more than about 20%, no more than about 30%, no more than about 40%, no more than about 50%, no more than about 60%, no more than about 70%, no more than about 80%, or no more than about 90% relative to the baseline APOB measurement. In some embodiments, the APOB measurement is decreased by 2.5%, 5%, 7.5%, 10%, 20%, 30%, 40%, 50%, 60%, 70%, 80%, or 90%, or by a range defined by any of the two aforementioned percentages.

[0301] In some embodiments, the measurement is a glucose measurement. In some embodiments, the glucose measurement comprises a glucose concentration (for example, mg/dL). In some embodiments, the glucose measurement is a glucose concentration. In some embodiments, the glucose measurement is a circulating glucose measurement. In some embodiments, the glucose measurement is obtained by an assay such as an immunoassay, a colorimetric assay, or a fluorescence assay. In some embodiments, the glucose measurement is obtained using a glucometer.

[0302] In some embodiments, the glucose measurement comprises a glucose tolerance test. In some embodiments, the glucose tolerance test comprises administering glucose to the subject, and then obtaining multiple glucose measurements over time after administering the glucose to the subject. In some embodiments, the glucose is administered orally. In some embodiments, the glucose is administered by injection. In some embodiments, the multiple glucose measurements are integrated into a glucose area under the curve (AUC) measurement. In some embodiments, the glucose tolerance test is performed on the subject in a fasted state such as after an overnight fast. In some embodiments, the glucose measurement comprises a glucose measurement other than a glucose tolerance test.

[0303] In some embodiments, the composition reduces the glucose measurement relative to the baseline glucose measurement. In some embodiments, the composition reduces circulating glucose relative to the baseline glucose measurement. In some embodiments, the reduced glucose is measured in a second sample obtained from the subject after administering the composition to the subject. In some embodiments, the composition reduces one or more of the multiple glucose measurements of the glucose tolerance test relative to one or more of the multiple glucose measurements of the baseline glucose tolerance test. In some embodiments, the composition reduces the glucose AUC measurement relative to the baseline glucose AUC measurement. In some embodiments, the glucose measurement is decreased by about 2.5% or more, about 5% or more, or about 7.5% or more, relative to the baseline glucose measurement. In some embodiments, the glucose measurement is decreased by about 10% or more, relative to the baseline glucose measurement. In some embodiments, the glucose measurement is decreased by about 20% or more, about 30% or more, about 40% or more, about 50% or more, about 60% or more, about 70% or more, about 80% or more, about 90% or more, or about 100%, relative to the baseline glucose measurement. In some embodiments, the glucose is decreased by no more than about 2.5%, no more than about 5%, or no more than about 7.5%, relative to the baseline glucose measurement. In some embodiments, the glucose is decreased by no more than about 10%, relative to the baseline glucose measurement. In some embodiments, the glucose is decreased by no more than about 20%, no more than about 30%, no more than about 40%, no more than about 50%, no more than about 60%, no more than about 70%, no more than about 80%, no more than about 90%, or no more than about 100% relative to the baseline glucose measurement. In some embodiments, the glucose measurement is decreased by 2.5%, 5%, 7.5%, 10%, 20%, 30%, 40%, 50%, 60%, 70%, 80%, 90%, 100%, or by a range defined by any of the two aforementioned percentages.

[0304] In some embodiments, the measurement is an insulin measurement. In some embodiments, the insulin measurement is an insulin sensitivity measurement. In some embodiments, the insulin sensitivity measurement is obtained using a glucose clamp technique such as a hyperinsulinemic euglycemic clamp. In some embodiments, the insulin measurement comprises an insulin concentration. In some embodiments, the insulin measurement is an insulin concentration. In some embodiments, the insulin measurement is a circulating insulin measurement. In some embodiments, the insulin measurement is obtained by an assay such as an immunoassay, a colorimetric assay, or a fluorescence assay. In some embodiments, the insulin sensitivity measurement comprises a glucose tolerance test. In some embodiments, the insulin sensitivity measurement comprises an insulin sensitivity measurement other than a glucose tolerance test.

[0305] In some embodiments, the insulin measurement comprises an insulin response test. In some embodiments, the insulin response test comprises administering glucose to the subject, and then obtaining multiple insulin measurements over time after administering the glucose to the subject. In some embodiments, the glucose is administered orally. In some embodiments, the glucose is administered by injection. In some embodiments, the multiple insulin measurements are integrated into an insulin AUC measurement. In some embodiments, the insulin response test is performed on the subject in a fasted state such as after an overnight fast.

[0306] In some embodiments, the insulin measurement comprises a glucose response test. In some embodiments, the glucose response test comprises administering insulin to the subject, and then obtaining multiple glucose measurements over time after administering the insulin to the subject. In some embodiments, the insulin is administered by injection. In some embodiments, the multiple glucose measurements are integrated into a glucose AUC measurement. In some embodiments, the multiple glucose measurements are measured with a glucometer. In some embodiments, the glucose response test is performed on the subject in a fasted state such as after an overnight fast. In some embodiments, the glucose response test is performed on the subject after administering food, drink, or glucose to the subject.

[0307] In some embodiments, the composition increases the insulin sensitivity relative to the baseline insulin sensitivity measurement. In some embodiments, the insulin sensitivity is increased by about 2.5% or more, about 5% or more, or about 7.5% or more, relative to the baseline insulin sensitivity measurement. In some embodiments, the insulin sensitivity is increased by about 10% or more, relative to the baseline insulin sensitivity measurement. In some embodiments, the insulin sensitivity is increased by about 20% or more, about 30% or more, about 40% or more, about 50% or more, about 60% or more, about 70% or more, about 80% or more, about 90% or more, or about 100% or more relative to the baseline insulin sensitivity measurement. In some embodiments, the insulin sensitivity is increased by about 200% or more, about 300% or more, about 400% or more, about 500% or more, about 600% or more, about 700% or more, about 800% or more, about 900% or more, or about 1000% or more, relative to the baseline insulin sensitivity measurement. In some embodiments, the insulin sensitivity is increased by no more than about 2.5%, no more than about 5%, or no more than about 7.5%, relative to the baseline insulin sensitivity measurement. In some embodiments, the insulin sensitivity is increased by no more than about 10%, relative to the baseline insulin sensitivity measurement. In some embodiments, the insulin sensitivity is increased by no more than about 20%, no more than about 30%, no more than about 40%, no more than about 50%, no more than about 60%, no more than about 70%, no more than about 80%, no more than about 90%, or no more than about 100% relative to the baseline insulin sensitivity measurement. In some embodiments, the insulin sensitivity is increased by no more than about 200%, no more than about 300%, no more than about 400%, no more than about 500%, no more than about 600%, no more than about 700%, no more than about 800%, no more than about 900%, or no more than about 1000%, relative to the baseline insulin sensitivity measurement. In some embodiments, the insulin sensitivity is increased by 2.5%, 5%, 7.5%, 10%, 20%, 30%, 40%, 50%, 60%, 70%, 80%, 90%, 100%, 200% 300%, 400%, 500%, 600%, 700%, 800%, 900%, 1000%, or by a range defined by any of the two aforementioned percentages.

[0308] In some embodiments, the composition reduces the insulin measurement relative to the baseline insulin measurement. In some embodiments, the composition reduces circulating insulin relative to the baseline insulin measurement. In some embodiments, the reduced insulin is measured in a second sample obtained from the subject after administering the composition to the subject. In some embodiments, the composition reduces the insulin AUC measurement relative to the baseline insulin AUC measurement.

[0309] In some embodiments, the insulin measurement is decreased by about 2.5% or more, about 5% or more, or about 7.5% or more, relative to the baseline insulin measurement. In some embodiments, the insulin measurement is decreased by about 10% or more, relative to the baseline insulin measurement. In some embodiments, the insulin measurement is decreased by about 20% or more, about 30% or more, about 40% or more, about 50% or more, about 60% or more, about 70% or more, about 80% or more, about 90% or more, or about 100%, relative to the baseline insulin measurement. In some embodiments, the insulin is decreased by no more than about 2.5%, no more than about 5%, or no more than about 7.5%, relative to the baseline insulin measurement. In some embodiments, the insulin is decreased by no more than about 10%, relative to the baseline insulin measurement. In some embodiments, the insulin is decreased by no more than about 20%, no more than about 30%, no more than about 40%, no more than about 50%, no more than about 60%, no more than about 70%, no more than about 80%, no more than about 90%, or no more than about 100% relative to the baseline insulin measurement. In some embodiments, the insulin measurement is decreased by 2.5%, 5%, 7.5%, 19%, 20%, 30%, 40%, 50%, 60%, 70%, 80%, 90%, 100%, or by a range defined by any of the two aforementioned percentages.

[0310] In some embodiments, the measurement is a systolic blood (SBP) pressure measurement. In some embodiments, the SBP measurement is measured in mm of mercury (mm Hg). In some embodiments, the SBP measurement is obtained with a sphygmomanometer. The SBP measurement may be indicative of hypertension. The SBP measurement may be indicative of normal blood pressure. The SBP measurement may include a cerebral SBP measurement.

[0311] In some embodiments, the composition reduces the SBP measurement relative to the baseline SBP measurement. In some embodiments, the reduction is measured directly in the subject after administering the composition to the subject. In some embodiments, the SBP measurement is decreased by about 2.5% or more, about 5% or more, or about 7.5% or more, relative to the baseline SBP measurement. In some embodiments, the SBP measurement is decreased by about 10% or more, relative to the baseline SBP measurement. In some embodiments, the SBP measurement is decreased by about 20% or more, about 30% or more, about 40)% or more, about 50% or more, about 60)% or more, about 70% or more, about 80% or more, about 90% or more, relative to the baseline SBP measurement. In some embodiments, the SBP measurement is decreased by no more than about 2.5%, no more than about 5%, or no more than about 7.5%, relative to the baseline SBP measurement. In some embodiments, the SBP measurement is decreased by no more than about 10%, relative to the baseline SBP measurement. In some embodiments, the SBP measurement is decreased by no more than about 20)%, no more than about 30%, no more than about 40%, no more than about 50%, no more than about 60)%, no more than about 70%, no more than about 80%, or no more than about 90% relative to the baseline SBP measurement. In some embodiments, the SBP measurement is decreased by 2.5%, 5%, 7.5%, 10%, 20%, 30%, 40%, 50%, 60%, 70%, 80%, or 90%, or by a range defined by any of the two aforementioned percentages.

[0312] In some embodiments, the measurement is a diastolic blood (DBP) pressure measurement. In some embodiments, the DBP measurement is measured in mm of mercury (mm Hg). In some embodiments, the DBP measurement is obtained with a sphygmomanometer. The DBP measurement may be indicative of hypertension. The DBP measurement may be indicative of normal blood pressure. The DBP measurement may include a cerebral DBP measurement.

[0313] In some embodiments, the composition reduces the DBP measurement relative to the baseline DBP measurement. In some embodiments, the reduction is measured directly in the subject after administering the composition to the subject. In some embodiments, the DBP measurement is decreased by about 2.5% or more, about 5% or more, or about 7.5% or more, relative to the baseline DBP measurement. In some embodiments, the DBP measurement is decreased by about 10% or more, relative to the baseline DBP measurement. In some embodiments, the DBP measurement is decreased by about 20% or more, about 30% or more, about 40)% or more, about 50% or more, about 60% or more, about 70)% or more, about 80% or more, about 90% or more, relative to the baseline DBP measurement. In some embodiments, the DBP measurement is decreased by no more than about 2.5%, no more than about 5%, or no more than about 7.5%, relative to the baseline DBP measurement. In some embodiments, the DBP measurement is decreased by no more than about 10%, relative to the baseline DBP measurement. In some embodiments, the DBP measurement is decreased by no more than about 20)%, no more than about 30%, no more than about 40)%, no more than about 50)%, no more than about 60)%, no more than about 70)%, no more than about 80%, or no more than about 90% relative to the baseline DBP measurement. In some embodiments, the DBP measurement is decreased by 2.5%, 5%, 7.5%, 10%, 20%, 30%, 40%, 50%, 60%, 70%, 80%, or 90%, or by a range defined by any of the two aforementioned percentages.

[0314] In some embodiments, the measurement is a systolic heart function measurement. A heart systolic function measurement may include a measure of heart pumping capacity. An example of a systolic function measurement includes an ejection fraction measurement. A ejection fraction measurement may include a left ventricular ejection fraction measurement, a right ventricular ejection fraction measurement, a left atrial ejection fraction measurement, or a right atrial ejection fraction measurement. In some embodiments, the ejection fraction measurement includes a left ventricular ejection fraction measurement. A subject with heart failure, for example, may have a left ventricular ejection fraction below 60%, below 50%, below 40%, below 30%, below: 20%, or below 10%. In some embodiments, a left ventricular ejection fraction below 35% is indicative of systolic dysfunction. Another example of a systolic heart function measurement is a cardiac output measurement. The systolic heart function measurement may be measured using a medical imaging device such as an ultrasound (e.g., an echocardiography device) or magnetic resonance imaging device.

[0315] In some embodiments, the composition increases the systolic heart function measurement relative to the baseline systolic heart function measurement. In some embodiments, the increase is measured in a second sample obtained from the subject after administering the composition to the subject. In some embodiments, the systolic heart function measurement is increased by about 2.5% or more, about 5% or more, or about 7.5% or more, relative to the baseline systolic heart function measurement. In some embodiments, the systolic heart function measurement is increased by about 10% or more, relative to the baseline systolic heart function measurement. In some embodiments, the systolic heart function measurement is increased by about 20% or more, about 30% or more, about 40% or more, about 50% or more, about 60% or more, about 70% or more, about 80% or more, about 90% or more, relative to the baseline systolic heart function measurement. In some embodiments, the systolic heart function measurement is increased by about 100% or more, increased by about 250% or more, increased by about 500% or more, increased by about 750% or more, or increased by about 1000% or more, relative to the baseline systolic heart function measurement. In some embodiments, the systolic heart function measurement is increased by no more than about 2.5%, no more than about 5%, or no more than about 7.5%, relative to the baseline systolic heart function measurement. In some embodiments, the systolic heart function measurement is increased by no more than about 10%, relative to the baseline systolic heart function measurement. In some embodiments, the systolic heart function measurement is increased by no more than about 20%, no more than about 30%, no more than about 40%, no more than about 50%, no more than about 60%, no more than about 70%, no more than about 80%, no more than about 90%, or no more than about 100% relative to the baseline systolic heart function measurement. In some embodiments, the systolic heart function measurement is increased by no more than about 100%, increased by no more than about 250%, increased by no more than about 500%, increased by no more than about 750%, or increased by no more than about 1000%, relative to the baseline systolic heart function measurement. In some embodiments, the systolic heart function measurement is increased by 2.5%, 5%, 7.5%, 10%, 20%, 30%, 40%, 50%, 60%, 70%, 80%, 90%, 100%, 250%, 500%, 750%, or 1000%, or by a range defined by any of the two aforementioned percentages.

[0316] In some embodiments, the measurement is a liver enzyme measurement. In some embodiments, the liver enzyme measurement is an alanine aminotransferase (ALT) measurement. In some embodiments, the liver enzyme measurement is an aspartate aminotransferase (AST) measurement. In some embodiments, the liver enzyme measurement comprises an ALT/AST ratio, or comprises an AST/ALT ratio.

[0317] In some embodiments, the measurement is an alanine aminotransferase (ALT) measurement. In some embodiments, the ALT measurement is an ALT concentration (for example. Units/dL). In some embodiments, the ALT measurement is a blood ALT measurement, for example, a blood, serum, or plasma ALT level. In some embodiments, the ALT measurement is obtained by an assay such as an immunoassay, a colorimetric assay, or a fluorescence assay.

[0318] In some embodiments, the composition reduces the ALT measurement relative to the baseline ALT measurement. In some embodiments, the reduced ALT is measured in a second blood sample, plasma sample, or serum sample obtained from the subject after administering the composition to the subject. In some embodiments, the ALT measurement is decreased by about 2.5% or more, about 5% or more, or about 7.5% or more, relative to the baseline ALT measurement. In some embodiments, the ALT measurement is decreased by about 10% or more, relative to the baseline ALT measurement. In some embodiments, the ALT measurement is decreased by about 20% or more, about 30% or more, about 40% or more, about 50% or more, about 60% or more, about 70% or more, about 80% or more, about 90% or more, relative to the baseline ALT measurement. In some embodiments, the ALT measurement is decreased by no more than about 2.5%, no more than about 5%, or no more than about 7.5%, relative to the baseline ALT measurement. In some embodiments, the ALT measurement is decreased by no more than about 10%, relative to the baseline ALT measurement. In some embodiments, the ALT measurement is decreased by no more than about 20%, no more than about 30%, no more than about 40%, no more than about 50%, no more than about 60%, no more than about 70%, no more than about 80%, no more than about 90%, or no more than about 100% relative to the baseline ALT measurement. In some embodiments, the ALT measurement is decreased by 2.5%, 5%, 7.5%, 10%, 20%, 30%, 40%, 50%, 60%, 70%, 80%, 90%, or 100%, or by a range defined by any of the two aforementioned percentages.

[0319] In some embodiments, the measurement is an aspartate aminotransferase (AST) measurement. In some embodiments, the AST measurement is an AST concentration (for example. Units/dL). In some embodiments, the AST measurement is a blood AST measurement, for example, a blood, serum, or plasma AST level. In some embodiments, the AST measurement is obtained by an assay such as an immunoassay, a colorimetric assay, or a fluorescence assay.

[0320] In some embodiments, the composition reduces the AST measurement relative to the baseline AST measurement. In some embodiments, the reduced AST is measured in a second blood sample, plasma sample, or serum sample obtained from the subject after administering the composition to the subject. In some embodiments, the AST measurement is decreased by about 2.5% or more, about 5% or more, or about 7.5% or more, relative to the baseline AST measurement. In some embodiments, the AST measurement is decreased by about 10% or more, relative to the baseline AST measurement. In some embodiments, the AST measurement is decreased by about 20% or more, about 30% or more, about 40% or more, about 50% or more, about 60% or more, about 70% or more, about 80% or more, about 90% or more, relative to the baseline AST measurement. In some embodiments, the AST measurement is decreased by no more than about 2.5%, no more than about 5%, or no more than about 7.5%, relative to the baseline AST measurement. In some embodiments, the AST measurement is decreased by no more than about 10%, relative to the baseline AST measurement. In some embodiments, the AST measurement is decreased by no more than about 20%, no more than about 30%, no more than about 40%, no more than about 50%, no more than about 60%, no more than about 70%, no more than about 80%, no more than about 90%, or no more than about 100% relative to the baseline AST measurement. In some embodiments, the AST measurement is decreased by 2.5%, 5%, 7.5%, 10%, 20%, 30%, 40%, 50%, 60%, 70%, 80%, 90%, or 100%, or by a range defined by any of the two aforementioned percentages.

[0321] In some embodiments, the measurement is a alkaline phosphatase (ALP) measurement. In some embodiments, the ALP measurement is a ALP concentration. In some embodiments, the ALP measurement is a blood ALP measurement. In some embodiments, the ALP measurement is obtained by an assay such as an immunoassay, a colorimetric assay, a chromatography assay, or a fluorescence assay.

[0322] In some embodiments, the composition reduces the ALP measurement relative to the baseline ALP measurement. In some embodiments, the reduced ALP is measured in a second blood sample, plasma sample, or serum sample obtained from the subject after administering the composition to the subject. In some embodiments, the ALP measurement is decreased by about 2.5% or more, about 5% or more, or about 7.5% or more, relative to the baseline ALP measurement. In some embodiments, the ALP measurement is decreased by about 10% or more, relative to the baseline ALP measurement. In some embodiments, the ALP measurement is decreased by about 20% or more, about 30% or more, about 40% or more, about 50% or more, about 60)% or more, about 70% or more, about 80% or more, about 90% or more, relative to the baseline ALP measurement. In some embodiments, the ALP measurement is decreased by no more than about 2.5%, no more than about 5%, or no more than about 7.5%, relative to the baseline ALP measurement. In some embodiments, the ALP measurement is decreased by no more than about 10%, relative to the baseline ALP measurement. In some embodiments, the ALP measurement is decreased by no more than about 20%, no more than about 30%, no more than about 40%, no more than about 50%, no more than about 60%, no more than about 70%, no more than about 80%, no more than about 90%, or no more than about 100% relative to the baseline ALP measurement. In some embodiments, the ALP measurement is decreased by 2.5%, 5%, 7.5%, 10%, 20%, 30%, 40%, 50%, 60%, 70%, 80%, 90%, or 100%, or by a range defined by any of the two aforementioned percentages.

[0323] In some embodiments, the measurement is a gamma-glutamyl transferase (GGT) measurement. In some embodiments, the GGT measurement is a GGT concentration. In some embodiments, the GGT measurement is a blood GGT measurement. In some embodiments, the GGT measurement is obtained by an assay such as an immunoassay, a colorimetric assay, a chromatography assay, or a fluorescence assay.

[0324] In some embodiments, the composition reduces the GGT measurement relative to the baseline GGT measurement. In some embodiments, the reduced GGT is measured in a second blood sample, plasma sample, or serum sample obtained from the subject after administering the composition to the subject. In some embodiments, the GGT measurement is decreased by about 2.5% or more, about 5% or more, or about 7.5% or more, relative to the baseline GGT measurement. In some embodiments, the GGT measurement is decreased by about 10% or more, relative to the baseline GGT measurement. In some embodiments, the GGT measurement is decreased by about 20% or more, about 30% or more, about 40% or more, about 50% or more, about 60% or more, about 70% or more, about 80% or more, about 90% or more, relative to the baseline GGT measurement. In some embodiments, the GGT measurement is decreased by no more than about 2.5%, no more than about 5%, or no more than about 7.5%, relative to the baseline GGT measurement. In some embodiments, the GGT measurement is decreased by no more than about 10%, relative to the baseline GGT measurement. In some embodiments, the GGT measurement is decreased by no more than about 20%, no more than about 30%, no more than about 40%, no more than about 50%, no more than about 60%, no more than about 70%, no more than about 80%, no more than about 90%, or no more than about 100% relative to the baseline GGT measurement. In some embodiments, the GGT measurement is decreased by 2.5%, 5%, 7.5%, 10%, 20%, 30%, 40%, 50%, 60%, 70%, 80%, 90%, or 100%, or by a range defined by any of the two aforementioned percentages.

[0325] In some embodiments, the measurement is a liver fibrosis measurement. In some embodiments, the liver fibrosis measurement is a liver fibrosis score (LFS). In some embodiments, the LFS comprises a score of 0, 1, 2, 3, or 4, or a range of scores defined by any two of the aforementioned numbers. In some embodiments, the LFS comprises a score of 0-4. In some embodiments, the LFS is obtained using a scoring system. In some embodiments, the LFS measurement is obtained noninvasively. In some embodiments, the LFS measurement is obtained by a medical imaging device such as a vibration-controlled transient elastography (VCTE) device, a shear wave elastography device, a medical resonance imaging (MRI) device, a magnetic resonance spectroscopy device, a computed tomography device, or an ultrasound device. In some embodiments, the LFS measurement is obtained in a second liver sample. In some embodiments, the LFS is obtained by an assay such as an immunoassay, a colorimetric assay, or a fluorescence assay. In some embodiments, the LFS is obtained using one or more indirect markers or measures of liver fibrosis such as an aspartate aminotransferase-to-platelet ratio index (APRI), a Fibrosis-4 (FIB-4) index, a FibroIndex, a Forns Index, a Hepascore, or a FibroTest. In some embodiments, the LFS is obtained using one or more indirect markers or measures of liver fibrosis such as a FIBROSpect test or a FIBROSpect II test. In some embodiments, the LFS is obtained by RT-qPCR or RNA sequencing of one or more fibrosis-related genes such as a collagen gene. In some embodiments, the LFS or the LFS is obtained using a scoring system upon a visual inspection of a sample such as a histological sample. In some embodiments, the LFS or the LFS is obtained using a stain with an affinity to collagen.

[0326] In some embodiments, the composition reduces the LFS relative to the baseline LFS. In some embodiments, the reduced LFS is measured in a second liver sample obtained from the subject after administering the composition to the subject. In some embodiments, the reduced LFS is measured directly in the subject after administering the composition to the subject. In some embodiments, the LFS is decreased by 1 relative to the baseline LFS. In some embodiments, the LFS is decreased by 2 relative to the baseline LFS. In some embodiments, the LFS is decreased by 3 relative to the baseline LFS. In some embodiments, the LFS is decreased by 4 relative to the baseline LFS. In some embodiments, the LFS is decreased by 1 or more, relative to the baseline LFS. In some embodiments, the LFS is decreased by 2 or more, relative to the baseline LFS. In some embodiments, the LFS is decreased by 3 more, relative to the baseline LFS. In some embodiments, the LFS is decreased by no more than 1, relative to the baseline LFS. In some embodiments, the LFS is decreased by no more than 2, relative to the baseline LFS. In some embodiments, the LFS is decreased by no more than 3, relative to the baseline LFS. In some embodiments, the LFS is decreased by no more than 4, relative to the baseline LFS. In some embodiments, the LFS is decreased by 1, 2, 3, or 4, or by a range defined by any of the two aforementioned numbers.

[0327] In some embodiments, the liver fibrosis measurement is a nonalcoholic fatty liver disease (NAFLD) fibrosis score. A NAFLD fibrosis score may take into account laboratory test values such as platelet count, albumin, and AST/ALT ratio, and patient characteristics such as BMI, and diabetes status. A NAFLD fibrosis score below −1.455 may be indicative of no fibrosis, mild fibrosis, or moderate fibrosis. A NAFLD fibrosis score between-1.455 and 0.675 may be indicative of severe fibrosis. A NAFLD fibrosis score above 0.675 may be indicative of cirrhosis.

[0328] In some embodiments, the composition reduces the NAFLD fibrosis score relative to the baseline NAFLD fibrosis score. In some embodiments, the NAFLD fibrosis score is decreased by about 2.5% or more, about 5% or more, or about 7.5% or more, relative to the baseline NAFLD fibrosis score. In some embodiments, the NAFLD fibrosis score is decreased by about 10% or more, relative to the baseline NAFLD fibrosis score. In some embodiments, the NAFLD fibrosis score is decreased by about 20% or more, about 30% or more, about 40% or more, about 50% or more, about 60% or more, about 70% or more, about 80% or more, about 90% or more, relative to the baseline NAFLD fibrosis score. In some embodiments, the NAFLD fibrosis score is decreased by no more than about 2.5%, no more than about 5%, or no more than about 7.5%, relative to the baseline NAFLD fibrosis score. In some embodiments, the NAFLD fibrosis score is decreased by no more than about 10%, relative to the baseline NAFLD fibrosis score. In some embodiments, the NAFLD fibrosis score is decreased by no more than about 20%, no more than about 30%, no more than about 40%, no more than about 50%, no more than about 60%, no more than about 70%, no more than about 80%, no more than about 90%, or no more than about 100% relative to the baseline NAFLD fibrosis score. In some embodiments, the NAFLD fibrosis score is decreased by 2.5%, 5%, 7.5%, 10%, 20%, 30%, 40%, 50%, 60%, 70%, 80%, 90%, or 100%, or by a range defined by any of the two aforementioned percentages.

[0329] In some embodiments, the measurement is a non-alcoholic fatty liver disease (NAFLD) activity score. In some embodiments, the NAFLD activity score comprises a numerical value such as a number of points. In some embodiments, the numerical value is 0, 1, 2, 3, 4, 5, 6, 7, or 8, or a range defined by any two of the aforementioned numerical values. In some embodiments, the numerical value is 0-8. In some embodiments, the NAFLD activity score comprises a steatosis grade such as a liver fat percentage. In some embodiments, a steatosis grade <5% comprises 0 points in the NAFLD activity score. In some embodiments, a steatosis grade of 5-33% comprises 1 point in the NAFLD activity score. In some embodiments, a steatosis grade of 34-66% comprises 2 points in the NAFLD activity score. In some embodiments, a steatosis grade of >66% comprises 3 points in the NAFLD activity score. In some embodiments, the NAFLD activity score comprises a lobular inflammation grade. In some embodiments, the lobular inflammation grade comprises an assessment of inflammatory foci. In some embodiments, a lobular inflammation grade comprising 0 foci comprises 0 points in the NAFLD activity score. In some embodiments, a lobular inflammation grade comprising 1 focus per a field (such as a 20× field or a 200× field) comprises 1 point in the NAFLD activity score. In some embodiments, a lobular inflammation grade comprising 2-4 foci per field comprises 2 points in the NAFLD activity score. In some embodiments, a lobular inflammation grade comprising >4 foci per field comprises 3 points in the NAFLD activity score. In some embodiments, the NAFLD activity score comprises a liver cell injury grade such as an amount of ballooning cells. In some embodiments, a liver cell injury comprising no ballooning cells comprises 0 points in the NAFLD activity score. In some embodiments, a liver cell injury comprising some new balloon cells comprises 1 point in the NAFLD activity score. In some embodiments, a liver cell injury comprising many ballooning cells or prominent ballooning comprises 2 points in the NAFLD activity score. In some embodiments, the NAFLD activity score is obtained invasively, based on histology, and/or in a liver biopsy.

[0330] In some embodiments, the composition reduces the NAFLD activity score relative to the baseline NAFLD activity score. In some embodiments, the reduced NAFLD activity score is measured in a second liver sample obtained from the subject after administering the composition to the subject. In some embodiments, the NAFLD activity score is decreased by 1 relative to the baseline NAFLD activity score. In some embodiments, the NAFLD activity score is decreased by 2 relative to the baseline NAFLD activity score. In some embodiments, the NAFLD activity score is decreased by 3 relative to the baseline NAFLD activity score. In some embodiments, the NAFLD activity score is decreased by 4 relative to the baseline NAFLD activity score. In some embodiments, the NAFLD activity score is decreased by 5 relative to the baseline NAFLD activity score. In some embodiments, the NAFLD activity score is decreased by 6 relative to the baseline NAFLD activity score. In some embodiments, the NAFLD activity score is decreased by 7 relative to the baseline NAFLD activity score. In some embodiments, the NAFLD activity score is decreased by 8 relative to the baseline NAFLD activity score. In some embodiments, the NAFLD activity score is decreased by 1 or more, relative to the baseline NAFLD activity score. In some embodiments, the NAFLD activity score is decreased by 2 or more, 3 or more, 4 or more, 5 or more, 6 or more, 7 or more, or 8 or more, relative to the baseline NAFLD activity score. In some embodiments, the NAFLD activity score is decreased by no more than 1, no more than 2, no more than 3, no more than 4, no more than 5, no more than 6, no more than 7, or no more than 8, relative to the baseline NAFLD activity score. In some embodiments, the NAFLD activity score is decreased by 1, 2, 3, 4, 5, 6, 7, or 8, or by a range defined by any of the two aforementioned numbers.

[0331] In some embodiments, the measurement is a liver steatosis measurement. In some embodiments, the liver steatosis measurement is a liver fat percentage (LFP) measurement. In some embodiments, the measurement is a LFP measurement. In some embodiments, the LFP measurement is indicated as a mass/mass percentage of fat/total tissue. In some embodiments, the LFP measurement is indicated as a mass/volume percentage of fat/total tissue. In some embodiments, the LFP measurement is indicated as a volume/mass percentage of fat/total tissue. In some embodiments, the LFP measurement is indicated as a volume/volume percentage of fat/total tissue. In some embodiments, the LFP measurement is indicated as a score. In some embodiments, the LFP measurement is obtained noninvasively. In some embodiments, the LFP measurement is obtained by a medical imaging device. In some embodiments, the LFP measurement is obtained by a device such as a medical resonance imaging (MRI) device, a magnetic resonance spectroscopy device, a computed tomography device, a controlled attenuation parameter (CAP), a transient elastography device, or an ultrasound device. In some embodiments, the LFP measurement is obtained in a second liver sample. In some embodiments, the LFP measurement comprises a liver triglyceride measurement. In some embodiments, the LFP measurement is obtained by an assay such as an immunoassay, a colorimetric assay, or a fluorescence assay. In some embodiments, the LFP measurement or the LFP measurement is obtained using a scoring system upon a visual inspection of a sample such as a histological sample. In some embodiments, the LFP measurement or the LFP measurement is obtained using a stain with an affinity to fats, such as a lysochrome diazo dye.

[0332] In some embodiments, the composition reduces the LFP measurement relative to the baseline LFP measurement. In some embodiments, the reduced LFP is measured in a second liver sample obtained from the subject after administering the composition to the subject. In some embodiments, the reduced LFP is measured directly in the subject after administering the composition to the subject. In some embodiments, the LFP measurement is decreased by about 2.5% or more, about 5% or more, or about 7.5% or more, relative to the baseline LFP measurement. In some embodiments, the LFP measurement is decreased by about 10% or more, relative to the baseline LFP measurement. In some embodiments, the LFP measurement is decreased by about 20% or more, about 30% or more, about 40% or more, about 50% or more, about 60% or more, about 70% or more, about 80% or more, about 90% or more, relative to the baseline LFP measurement. In some embodiments, the LFP measurement is decreased by no more than about 2.5%, no more than about 5%, or no more than about 7.5%, relative to the baseline LFP measurement. In some embodiments, the LFP measurement is decreased by no more than about 10%, relative to the baseline LFP measurement. In some embodiments, the LFP measurement is decreased by no more than about 20%, no more than about 30%, no more than about 40%, no more than about 50%, no more than about 60%, no more than about 70%, no more than about 80%, no more than about 90%, or no more than about 100% relative to the baseline LFP measurement. In some embodiments, the LFP measurement is decreased by 2.5%, 5%, 7.5%, 10%, 20%, 30%, 40%, 50%, 60%, 70%, 80%, 90%, or 100%, or by a range defined by any of the two aforementioned percentages.

[0333] In some embodiments, the measurement is an PLIN1 protein measurement. In some embodiments, the PLIN1 protein measurement comprises an PLIN1 protein level. In some embodiments, the PLIN1 protein level is indicated as a mass or percentage of PLIN1 protein per sample weight. In some embodiments, the PLIN1 protein level is indicated as a mass or percentage of PLIN1 protein per sample volume. In some embodiments, the PLIN1 protein level is indicated as a mass or percentage of PLIN1 protein per total protein within the sample. In some embodiments, the PLIN1 protein measurement is a circulating PLIN1 protein measurement. In some embodiments, the PLIN1 protein measurement is obtained by an assay such as an immunoassay, a colorimetric assay, or a fluorescence assay.

[0334] In some embodiments, the composition reduces the PLIN1 protein measurement relative to the baseline PLIN1 protein measurement. In some embodiments, the composition reduces circulating PLIN1 protein levels relative to the baseline PLIN1 protein measurement. In some embodiments, the composition reduces tissue PLIN1 protein levels relative to the baseline PLIN1 protein measurement. In some embodiments, the reduced PLIN1 protein levels are measured in a second sample obtained from the subject after administering the composition to the subject. In some embodiments, the PLIN1 protein measurement is decreased by about 2.5% or more, about 5% or more, or about 7.5% or more, relative to the baseline PLIN1 protein measurement. In some embodiments, the PLIN1 protein measurement is decreased by about 10% or more, relative to the baseline PLIN1 protein measurement. In some embodiments, the PLIN1 protein measurement is decreased by about 20% or more, about 30% or more, about 40)% or more, about 50)% or more, about 60% or more, about 70% or more, about 80% or more, about 90% or more, or about 100%, relative to the baseline PLIN1 protein measurement. In some embodiments, the PLIN1 protein measurement is decreased by no more than about 2.5%, no more than about 5%, or no more than about 7.5%, relative to the baseline PLIN1 protein measurement. In some embodiments, the PLIN1 protein measurement is decreased by no more than about 10%, relative to the baseline PLIN1 protein measurement. In some embodiments, the PLIN1 protein measurement is decreased by no more than about 20%, no more than about 30%, no more than about 40)%, no more than about 50%, no more than about 60%, no more than about 70%, no more than about 80%, no more than about 90%, or no more than about 100% relative to the baseline PLIN1 protein measurement. In some embodiments, the PLIN1 protein measurement is decreased by 2.5%, 5%, 7.5%, 19%, 20%, 30%, 40%, 50%, 60%, 70%, 80%, 90%, or 100%, or by a range defined by any of the two aforementioned percentages.

[0335] In some embodiments, the measurement is an PLIN1 mRNA measurement. In some embodiments, the PLIN1 mRNA measurement comprises an PLIN1 mRNA level. In some embodiments, the PLIN1 mRNA level is indicated as an amount or percentage of PLIN1 mRNA per sample weight. In some embodiments, the PLIN1 mRNA level is indicated as an amount or percentage of PLIN1 mRNA per sample volume. In some embodiments, the PLIN1 mRNA level is indicated as an amount or percentage of PLIN1 mRNA per total mRNA within the sample. In some embodiments, the PLIN1 mRNA level is indicated as an amount or percentage of PLIN1 mRNA per total nucleic acids within the sample. In some embodiments, the PLIN1 mRNA level is indicated relative to another mRNA level, such as an mRNA level of a housekeeping gene, within the sample. In some embodiments, the PLIN1 mRNA measurement is obtained by an assay such as a PCR assay. In some embodiments, the PCR comprises qPCR. In some embodiments, the PCR comprises reverse transcription of the PLIN1 mRNA.

[0336] In some embodiments, the composition reduces the PLIN1 mRNA measurement relative to the baseline PLIN1 mRNA measurement. In some embodiments, the PLIN1 mRNA measurement is obtained in a second sample obtained from the subject after administering the composition to the subject. In some embodiments, the composition reduces PLIN1 mRNA levels relative to the baseline PLIN1 mRNA levels. In some embodiments, the reduced PLIN1 mRNA levels are measured in a second sample obtained from the subject after administering the composition to the subject. In some embodiments, the second sample is a liver sample. In some embodiments, the second sample is an adipose sample. In some embodiments, the PLIN1 mRNA measurement is reduced by about 2.5% or more, about 5% or more, or about 7.5% or more, relative to the baseline PLIN1 mRNA measurement. In some embodiments, the PLIN1 mRNA measurement is decreased by about 10% or more, relative to the baseline PLIN1 mRNA measurement. In some embodiments, the PLIN1 mRNA measurement is decreased by about 20% or more, about 30% or more, about 40% or more, about 50% or more, about 60% or more, about 70% or more, about 80% or more, about 90% or more, or about 100%, relative to the baseline PLIN1 mRNA measurement. In some embodiments, the PLIN1 mRNA measurement is decreased by no more than about 2.5%, no more than about 5%, or no more than about 7.5%, relative to the baseline PLIN1 mRNA measurement. In some embodiments, the PLIN1 mRNA measurement is decreased by no more than about 10%, relative to the baseline PLIN1 mRNA measurement. In some embodiments, the PLIN1 mRNA measurement is decreased by no more than about 20%, no more than about 30%, no more than about 40%, no more than about 50%, no more than about 60%, no more than about 70%, no more than about 80%, no more than about 90%, or no more than about 100%, relative to the baseline PLIN1 mRNA measurement. In some embodiments, the PLIN1 mRNA measurement is decreased by 2.5%, 5%, 7.5%, 10%, 20%, 30%, 40%, 50%, 60%, 70%, 80%, 90%, or 100% or by a range defined by any of the two aforementioned percentages.

### III. Definitions

[0337] Unless defined otherwise, all terms of art, notations and other technical and scientific terms or terminology used herein are intended to have the same meaning as is commonly understood by one of ordinary skill in the art to which the claimed subject matter pertains. In some cases, terms with commonly understood meanings are defined herein for clarity and/or for ready reference, and the inclusion of such definitions herein should not necessarily be construed to represent a substantial difference over what is generally understood in the art.

[0338] Throughout this application, various embodiments may be presented in a range format. It should be understood that the description in range format is merely for convenience and brevity and should not be construed as an inflexible limitation on the scope of the disclosure. Accordingly, the description of a range should be considered to have specifically disclosed all the possible subranges as well as individual numerical values within that range. For example, description of a range such as from 1 to 6 should be considered to have specifically disclosed subranges such as from 1 to 3, from 1 to 4, from 1 to 5, from 2 to 4, from 2 to 6, from 3 to 6 etc., as well as individual numbers within that range, for example, 1, 2, 3, 4, 5, and 6. This applies regardless of the breadth of the range.

[0339] As used in the specification and claims, the singular forms “a”. “an” and “the” include plural references unless the context clearly dictates otherwise. For example, the term “a sample” includes a plurality of samples, including mixtures thereof.

[0340] The terms “determining.” “measuring.” “evaluating.” “assessing.” “assaying.” and “analyzing” are often used interchangeably herein to refer to forms of measurement. The terms include determining if an element is present or not (for example, detection). These terms can include quantitative, qualitative or quantitative and qualitative determinations. Assessing can be relative or absolute. “Detecting the presence of” can include determining the amount of something present in addition to determining whether it is present or absent depending on the context.

[0341] The terms “subject,” and “patient” may be used interchangeably herein. A “subject” can be a biological entity containing expressed genetic materials. The biological entity can be a plant, animal, or microorganism, including, for example, bacteria, viruses, fungi, and protozoa. The subject can be a mammal. The mammal can be a human. The subject may be diagnosed or suspected of being at high risk for a disease. In some cases, the subject is not necessarily diagnosed or suspected of being at high risk for the disease.

[0342] As used herein, the term “about” a number refers to that number plus or minus 10% of that number. The term “about” a range refers to that range minus 10% of its lowest value and plus 10% of its greatest value.

[0343] As used herein, the terms “treatment” or “treating” are used in reference to a pharmaceutical or other intervention regimen for obtaining beneficial or desired results in the recipient. Beneficial or desired results include but are not limited to a therapeutic benefit and/or a prophylactic benefit. A therapeutic benefit may refer to eradication or amelioration of symptoms or of an underlying disorder being treated. Also, a therapeutic benefit can be achieved with the eradication or amelioration of one or more of the physiological symptoms associated with the underlying disorder such that an improvement is observed in the subject, notwithstanding that the subject may still be afflicted with the underlying disorder. A prophylactic effect includes delaying, preventing, or eliminating the appearance of a disease or condition, delaying or eliminating the onset of symptoms of a disease or condition, slowing, halting, or reversing the progression of a disease or condition, or any combination thereof. For prophylactic benefit, a subject at risk of developing a particular disease, or to a subject reporting one or more of the physiological symptoms of a disease may undergo treatment, even though a diagnosis of this disease may not have been made.

[0344] “Treatment” or “treating” may include an approach for obtaining beneficial or desired results with respect to a disease, disorder, or medical condition including but not limited to a therapeutic benefit and/or a prophylactic benefit. A therapeutic benefit can include, for example, the eradication or amelioration of the underlying disorder being treated. Also, a therapeutic benefit can include, for example, the eradication or amelioration of one or more of the physiological symptoms associated with the underlying disorder such that an improvement is observed in the subject, notwithstanding that the subject may still be afflicted with the underlying disorder. In certain embodiments, for prophylactic benefit, the compositions are administered to a subject at risk of developing a particular disease, or to a subject reporting one or more of the physiological symptoms of a disease, even though a diagnosis of this disease may not have been made. Treatment via administration of a compound described herein does not require the involvement of a medical professional.

[0345] The term “C_{x-y}” or “Cₓ-C_{y}” when used in conjunction with a chemical moiety, such as alkyl, alkenyl, or alkynyl is meant to include groups that contain from x to y carbons in the chain. For example, the term “C₁₋₆alkyl” refers to substituted or unsubstituted saturated hydrocarbon groups, including straight-chain alkyl and branched-chain alkyl groups that contain from 1 to 6 carbons.

[0346] The terms “C_{x-y} alkenyl” and “C_{x-y} alkynyl” refer to substituted or unsubstituted unsaturated aliphatic groups analogous in length and possible substitution to the alkyls described above, but that contain at least one double or triple bond, respectively.

[0347] The term “carbocycle” as used herein refers to a saturated, unsaturated or aromatic ring in which each atom of the ring is carbon. Carbocycle includes 3- to 10-membered monocyclic rings, 5- to 12-membered bicyclic rings, 5- to 12-membered spiro bicycles, and 5- to 12-membered bridged rings. Each ring of a bicyclic carbocycle may be selected from saturated, unsaturated, and aromatic rings. In an exemplary embodiment, an aromatic ring, e.g., phenyl, may be fused to a saturated or unsaturated ring, e.g., cyclohexane, cyclopentane, or cyclohexene. A bicyclic carbocycle includes any combination of saturated, unsaturated and aromatic bicyclic rings, as valence permits. A bicyclic carbocycle further includes spiro bicyclic rings such as spiropentane. A bicyclic carbocycle includes any combination of ring sizes such as 3-3 spiro ring systems, 4-4 spiro ring systems, 4-5 fused ring systems, 5-5 fused ring systems, 5-6 fused ring systems, 6-6 fused ring systems, 5-7 fused ring systems, 6-7 fused ring systems, 5-8 fused ring systems, and 6-8 fused ring systems. Exemplary carbocycles include cyclopentyl, cyclohexyl, cyclohexenyl, adamantyl, phenyl, indanyl, naphthyl, and bicyclo[1.1.1]pentanyl.

[0348] The term “aryl” refers to an aromatic monocyclic or aromatic multicyclic hydrocarbon ring system. The aromatic monocyclic or aromatic multicyclic hydrocarbon ring system contains only hydrogen and carbon and from five to eighteen carbon atoms, where at least one of the rings in the ring system is aromatic, i.e., it contains a cyclic, delocalized (4n+2) π-electron system in accordance with the Hückel theory. The ring system from which aryl groups are derived include, but are not limited to, groups such as benzene, fluorene, indane, indene, tetralin and naphthalene.

[0349] The term “cycloalkyl” refers to a saturated ring in which each atom of the ring is carbon. Cycloalkyl may include monocyclic and polycyclic rings such as 3- to 10-membered monocyclic rings, 5- to 12-membered bicyclic rings, 5- to 12-membered spiro bicycles, and 5- to 12-membered bridged rings. In certain embodiments, a cycloalkyl comprises three to ten carbon atoms. In other embodiments, a cycloalkyl comprises five to seven carbon atoms. The cycloalkyl may be attached to the rest of the molecule by a single bond. Examples of monocyclic cycloalkyls include, e.g., cyclopropyl, cyclobutyl, cyclopentyl, cyclohexyl, cycloheptyl, and cyclooctyl. Polycyclic cycloalkyl radicals include, for example, adamantyl, spiropentane, norbomyl (i.e., bicyclo[2.2.1]heptanyl), decalinyl, 7,7 dimethyl bicyclo[2.2.1]heptanyl, bicyclo[1.1.1]pentanyl, and the like.

[0350] The term “cycloalkenyl” refers to a saturated ring in which each atom of the ring is carbon and there is at least one double bond between two ring carbons. Cycloalkenyl may include monocyclic and polycyclic rings such as 3- to 10-membered monocyclic rings, 6- to 12-membered bicyclic rings, and 5- to 12-membered bridged rings. In other embodiments, a cycloalkenyl comprises five to seven carbon atoms. The cycloalkenyl may be attached to the rest of the molecule by a single bond. Examples of monocyclic cycloalkenyls include, e.g., cyclopentenyl, cyclohexenyl, cycloheptenyl, and cyclooctenyl.

[0351] The term “halo” or, alternatively, “halogen” or “halide,” means fluoro, chloro, bromo or iodo. In some embodiments, halo is fluoro, chloro, or bromo.

[0352] The term “haloalkyl” refers to an alkyl radical, as defined above, that is substituted by one or more halo radicals, for example, trifluoromethyl, dichloromethyl, bromomethyl, 2,2,2-trifluoroethyl, 1-chloromethyl-2-fluoroethyl, and the like. In some embodiments, the alkyl part of the haloalkyl radical is optionally further substituted as described herein.

[0353] The term “heterocycle” as used herein refers to a saturated, unsaturated or aromatic ring comprising one or more heteroatoms. Exemplary heteroatoms include N, O, Si, P, B, and S atoms. Heterocycles include 3- to 10-membered monocyclic rings, 6- to 12-membered bicyclic rings, 5- to 12-membered spiro bicycles, and 5- to 12-membered bridged rings. A bicyclic heterocycle includes any combination of saturated, unsaturated and aromatic bicyclic rings, as valence permits. In an exemplary embodiment, an aromatic ring, e.g., pyridyl, may be fused to a saturated or unsaturated ring, e.g., cyclohexane, cyclopentane, morpholine, piperidine or cyclohexene. A bicyclic heterocycle includes any combination of ring sizes such as 4-5 fused ring systems, 5-5 fused ring systems, 5-6 fused ring systems, 6-6 fused ring systems, 5-7 fused ring systems, 6-7 fused ring systems, 5-8 fused ring systems, and 6-8 fused ring systems. A bicyclic heterocycle further includes spiro bicyclic rings, e.g., 5 to 12-membered spiro bicycles, such as 2-oxa-6-azaspiro[3.3]heptane.

[0354] The term “heteroaryl” refers to a radical derived from a 5 to 18 membered aromatic ring radical that comprises two to seventeen carbon atoms and from one to six heteroatoms selected from nitrogen, oxygen and sulfur. As used herein, the heteroaryl radical is a monocyclic, bicyclic, tricyclic or tetracyclic ring system, wherein at least one of the rings in the ring system is aromatic, i.e., it contains a cyclic, delocalized (4n+2) π-electron system in accordance with the Hückel theory. Heteroaryl includes fused or bridged ring systems. The heteroatom(s) in the heteroaryl radical is optionally oxidized. One or more nitrogen atoms, if present, are optionally quaternized. The heteroaryl is attached to the rest of the molecule through any atom of the ring(s). Examples of heteroaryls include, but are not limited to, azepinyl, acridinyl, benzimidazolyl, benzindolyl, 1,3-benzodioxolyl, benzofuranyl, benzoxazolyl, benzo[d]thiazolyl, benzothiadiazolyl, benzo[b][1,4]dioxepinyl, benzo[b][1,4]oxavinyl, 1,4-benzodioxanyl, benzonaphthofuranyl, benzoxazolyl, benzodioxolyl, benzodioxinyl, benzopyranyl, benzopyranonyl, benzofuranyl, benzofuranonyl, benzothienyl (benzothiophenyl), benzothieno[3,2-d]pyrimidinyl, benzotriazolyl, benzo[4,6]imidazo[1,2-a]pyridinyl, carbazolyl, cinnolinyl, cyclopenta[d]pyrimidinyl, 6,7-dihydro-5H-cyclopenta[4,5]thieno[2,3-d]pyrimidinyl, 5,6-dihydrobenzo[h]quinazolinyl. 5,6-dihydrobenzo[h]cinnolinyl, 6,7-dihydro-5H-benzo[6,7]cyclohepta[1,2-c]pyridazinyl, dibenzofuranyl, dibenzothiophenyl, furanyl, furanonyl, furo[3,2-c]pyridinyl, 5,6,7,8,9,10-hexahydrocycloocta[d]pyrimidinyl, 5,6,7,8,9,10-hexahydrocycloocta[d]pyridavinyl, 5,6,7,8,9,10-hexahydrocycloocta[d]pyridinyl, isothiazolyl, imidazolyl, indazolyl, indolyl, indazolyl, isoindolyl, indolinyl, isoindolinyl, isoquinolyl, indolizinyl, isoxazolyl, 5,8-methano-5,6,7,8-tetrahydroquinazolinyl, naphthyridinyl, 1,6-naphthyridinonyl, oxadiazolyl, 2-oxoazepinyl, oxazolyl, oxiranyl, 5,6,6a,7,8,9,10,10a-octahydrobenzo[h]quinazolinyl, 1-phenyl-1H-pyrrolyl, phenazinyl phenothiazinyl, phenoxazinyl, phthalazinyl, pteridinyl, purinyl, pyrrolyl, pyrazolyl, pyrazolo[3,4-d]pyrimidinyl, pyridinyl, pyrido[3,2-d]pyrimidinyl, pyrido[3,4-d]pyrimidinyl, pyrazinyl, pyrimidinyl, pyridavinyl, pyrrolyl, quinazolinyl, quinoxalinyl, quinolinyl, isoquinolinyl, tetrahydroquinolinyl, 5,6,7,8-tetrahydroquinazolinyl, 5,6,7,8-tetrahydrobenzo[4,5]thieno[2,3-d]pyrimidinyl, 6,7,8,9-tetrahydro-5H-cyclohepta[4,5]thieno[2,3-d]pyrimidinyl, 5,6,7,8-tetrahydropyrido[4,5-c]pyridavinyl, thiazolyl, thiadiazolyl, triazolyl, tetrazolyl, triazinyl, thieno[2,3-d]pyrimidinyl, thieno[3,2-d]pyrimidinyl, thieno[2,3-c]pyridinyl, and thiophenyl (i.e., thienyl).

[0355] The term “heterocycloalkyl” refers to a saturated ring with carbon atoms and at least one heteroatom. Exemplary heteroatoms include N, O, Si, P, B, and S atoms. Heterocycloalkyl may include monocyclic and polycyclic rings such as 3- to 10-membered monocyclic rings, 6- to 12-membered bicyclic rings, 5- to 12-membered spiro bicycles, and 5- to 12-membered bridged rings. The heteroatoms in the heterocycloalkyl radical are optionally oxidized. One or more nitrogen atoms, if present, are optionally quaternized. The heterocycloalkyl is attached to the rest of the molecule through any atom of the heterocycloalkyl, valence permitting, such as any carbon or nitrogen atoms of the heterocycloalkyl. Examples of heterocycloalkyl radicals include, but are not limited to, dioxolanyl, thienyl[1,3]dithianyl, decahydroisoquinolyl, imidazolinyl, imidazolidinyl, isothiazolidinyl, isoxazolidinyl, morpholinyl, octahydroindolyl, octahydroisoindolyl, 2-oxopiperazinyl, 2-oxopiperidinyl, 2-oxopyrrolidinyl, oxazolidinyl, piperidinyl, piperazinyl, 4-piperidonyl, pyrrolidinyl, pyrazolidinyl, quinuclidinyl, thiazolidinyl, tetrahydrofuryl, trithianyl, tetrahydropyranyl, thiomorpholinyl, thiamorpholinyl, 1-oxo-thiomorpholinyl, 2-oxa-6-azaspiro[3.3]heptane, and 1,1-dioxo-thiomorpholinyl.

[0356] The term “heterocycloalkenyl” refers to an unsaturated ring with carbon atoms and at least one heteroatom and there is at least one double bond between two ring carbons. Heterocycloalkenyl does not include heteroaryl rings. Exemplary heteroatoms include N, O, Si, P, B, and S atoms. Heterocycloalkenyl may include monocyclic and polycyclic rings such as 3- to 10-membered monocyclic rings, 6- to 12-membered bicyclic rings, and 5- to 12-membered bridged rings. In other embodiments, a heterocycloalkenyl comprises five to seven ring atoms. The heterocycloalkenyl may be attached to the rest of the molecule by a single bond. Examples of monocyclic cycloalkenyls include, e.g., pyrroline (dihydropyrrole), pyrazoline (dihydropyrazole), imidazoline (dihydroimidazole), triazoline (dihydrothiazole), dihydrofuran, dihydrothiophene, oxazoline (dihydrooxazole), isoxazoline (dihydroisoxazole), thiazoline (dihydrothiazole), isothiazoline (dihydroisothiazole), oxadiazoline (dihydroxadiazole), thiadiazoline (dihydrothiadiazole), dihydropyridine, tetrahydropyridine, dihydropyridazine, tetrahydropyridazine, dihydropyrimidine, tetrahydropyrimidine, dihydropyrazine, tetrahydropyrazine, pyran, dihydropyran, thiopyran, dihydrothiopyran, dioxine, dihydrodioxine, oxazine, dihydrooxazine, thiazine, and dihydrothiazine.

[0357] The term “substituted” refers to moieties having substituents replacing a hydrogen on one or more carbons or substitutable heteroatoms, e.g., an NH or NH₂ of a compound. It will be understood that “substitution” or “substituted with” includes the implicit proviso that such substitution is in accordance with permitted valence of the substituted atom and the substituent, and that the substitution results in a stable compound, i.e., a compound which does not spontaneously undergo transformation such as by rearrangement, cyclization, elimination, etc. In certain embodiments, substituted refers to moieties having substituents replacing two hydrogen atoms on the same carbon atom, such as substituting the two hydrogen atoms on a single carbon with an oxo, imino or thioxo group. As used herein, the term “substituted” is contemplated to include all permissible substituents of organic compounds. In a broad aspect, the permissible substituents include acyclic and cyclic, branched and unbranched, carbocyclic and heterocyclic, aromatic and non-aromatic substituents of organic compounds. The permissible substituents can be one or more and the same or different for appropriate organic compounds.

[0358] In some embodiments, substituents may include any substituents described herein, for example: halogen, hydroxy, oxo (═O), thioxo (═S), cyano (—CN), nitro (—NO₂), imino (═N—H), oximo (═N—OH), hydrazino (═N—NH₂), —R^{b}—OR^{a}, —R^{b}—OC(O)—R^{a}, —R^{b}—OC(O)—OR^{a}, —R^{b}—OC(O)—N(R^{a})₂, —R^{b}—N(R^{a})₂, —R^{b}—C(O)R^{a}, —R^{b}—C(O)OR^{a}, —R^{b}—C(O)N(R^{a}), —R^{b}—O—R^{c}—C(O)N(R^{a})₂, —R^{b}—N(R^{a})C(O)OR^{a}, —R^{b}—N(R^{a})C(O)R^{a}, —R^{b}—N(R^{a})S(O)ₜR^{a} (where t is 1 or 2), —R^{b}—S(O)ₜR^{a} (where t is 1 or 2), —R^{b}—S(O)ₜOR^{a} (where t is 1 or 2), and —R^{b}—S(O),N(R^{a}) (where t is 1 or 2); and alkyl, alkenyl, alkynyl, aryl, aralkyl, aralkenyl, aralkynyl, cycloalkyl, cycloalkylalkyl, heterocycloalkyl, heterocycloalkylalkyl, heteroaryl, and heteroarylalkyl, any of which may be optionally substituted by alkyl, alkenyl, alkynyl, halogen, haloalkyl, haloalkenyl, haloalkynyl, oxo (═O), thioxo (═S), cyano (—CN), nitro (—NO₂), imino (═N—H), oximo (═N—OH), hydrazine (═N—NH₂), —R^{b}—OR^{a}, —R^{b}—OC(O)—R^{a}, —R^{b}—OC(O)—OR^{a}, —R^{b}—OC(O)—N(R^{a})₂, —R^{b}—N(R^{a})₂, —R^{b}—C(O)R^{a}, —R^{b}—C(O)OR^{a}, —R^{b}—C(O)N(R^{a}), —R^{b}—O—R^{c}—C(O)N(R^{a})₂, —R^{b}—N(R^{a})C(O)OR^{a}, —R^{b}—N(R^{a})C(O)R^{a}, —R^{b}—N(R^{a})S(O)ₜR^{a} (where t is 1 or 2), —R^{b}—S(O)ₜR^{a} (where t is 1 or 2), —R^{b}—S(O)ₜOR^{a} (where t is 1 or 2) and —R^{b}—S(O),N(R^{a})₂ (where t is 1 or 2); wherein each R^{a} is independently selected from hydrogen, alkyl, cycloalkyl, cycloalkylalkyl, aryl, aralkyl, heterocycloalkyl, heterocycloalkylalkyl, heteroaryl, or heteroarylalkyl, wherein each R^{a} valence permitting, may be optionally substituted with alkyl, alkenyl, alkynyl, halogen, haloalkyl, haloalkenyl, haloalkynyl, oxo (═O), thioxo (═S), cyano (—CN), nitro (—NO₂), imino (═N—H), oximo (═N—OH), hydrazine (═N—NH₂), —R^{b}—OR^{a}, —R^{b}—OC(O)—R^{a}, —R^{b}—OC(O)—OR^{a}, —R^{b}—OC(O)—N(R^{a})₂, —R^{b}—N(R^{a}), —R^{b}—C(O)R^{a}, —R^{b}—C(O)OR^{a}, —R^{b}—C(O)N(R^{a})₂, —R^{b}—O—R^{c}—C(O)N(R^{a})₂, —R^{b}—N(R^{a})C(O)OR^{a}, —R^{b}—N(R^{a})C(O)R^{a}, —R^{b}—N(R^{a})S(O)ₜR^{a} (where t is 1 or 2), —R^{b}—S(O)R^{a} (where t is 1 or 2), —R^{b}—S(O)ₜOR^{a} (where t is 1 or 2) and —R^{b}—S(O)ₜN(R^{a}) (where t is 1 or 2); and wherein each R^{b} is independently selected from a direct bond or a straight or branched alkylene, alkenylene, or alkynylene chain, and each R^{c} is a straight or branched alkylene, alkenylene or alkynylene chain.

[0359] Double bonds to oxygen atoms, such as oxo groups, are represented herein as both “═O” and “(O)”. Double bonds to nitrogen atoms are represented as both “═NR” and “(NR)”. Double bonds to sulfur atoms are represented as both “═S” and “(S)”.

[0360] The phrases “parenteral administration” and “administered parenterally” as used herein means modes of administration other than enteral and topical administration, usually by injection, and includes, without limitation, intravenous, intramuscular, intra-arterial, intrathecal, intracapsular, intraorbital, intracardiac, intradermal, intraperitoneal, transtracheal, subcutaneous, subcuticular, intraarticular, subcapsular, subarachnoid, intraspinal and intrasternal injection and infusion.

[0361] The phrase “pharmaceutically acceptable” is employed herein to refer to those compounds, materials, compositions, and/or dosage forms which are, within the scope of sound medical judgment, suitable for use in contact with the tissues of human beings and animals without excessive toxicity, irritation, allergic response, or other problem or complication, commensurate with a reasonable benefit/risk ratio.

[0362] The phrase “pharmaceutically acceptable excipient” or “pharmaceutically acceptable carrier” as used herein means a pharmaceutically acceptable material, composition or vehicle, such as a liquid or solid filler, diluent, excipient, solvent or encapsulating material. Each carrier must be “acceptable” in the sense of being compatible with the other ingredients of the formulation and not injurious to the patient. Some examples of materials which can serve as pharmaceutically acceptable carriers include: (1) sugars, such as lactose, glucose and sucrose; (2) starches, such as corn starch and potato starch; (3) cellulose, and its derivatives, such as sodium carboxymethyl cellulose, ethyl cellulose and cellulose acetate; (4) powdered tragacanth; (5) malt; (6) gelatin; (7) talc; (8) excipients, such as cocoa butter and suppository waxes; (9) oils, such as peanut oil, cottonseed oil, safflower oil, sesame oil, olive oil, corn oil and soy bean oil; (10) glycols, such as propylene glycol; (11) polyols, such as glycerin, sorbitol, mannitol and polyethylene glycol; (12) esters, such as ethyl oleate and ethyl laurate; (13) agar; (14) buffering agents, such as magnesium hydroxide and aluminum hydroxide; (15) alginic acid; (16) pyrogen-free water; (17) isotonic saline; (18) Ringer's solution; (19) ethyl alcohol; (20) phosphate buffer solutions; and (21) other non-toxic compatible substances employed in pharmaceutical formulations.

[0363] The term “salt” or “pharmaceutically acceptable salt” refers to salts derived from a variety of organic and inorganic counter ions well known in the art. Pharmaceutically acceptable acid addition salts can be formed with inorganic acids and organic acids. Inorganic acids from which salts can be derived include, for example, hydrochloric acid, hydrobromic acid, sulfuric acid, nitric acid, phosphoric acid, and the like. Organic acids from which salts can be derived include, for example, acetic acid, propionic acid, glycolic acid, pyruvic acid, oxalic acid, maleic acid, malonic acid, succinic acid, fumaric acid, tartaric acid, citric acid, benzoic acid, cinnamic acid, mandelic acid, methanesulfonic acid, ethanesulfonic acid, p-toluenesulfonic acid, salicylic acid, and the like. Pharmaceutically acceptable base addition salts can be formed with inorganic and organic bases. Inorganic bases from which salts can be derived include, for example, sodium, potassium, lithium, ammonium, calcium, magnesium, iron, zinc, copper, manganese, aluminum, and the like. Organic bases from which salts can be derived include, for example, primary, secondary, and tertiary amines, substituted amines including naturally occurring substituted amines, cyclic amines, basic ion exchange resins, and the like, specifically such as isopropylamine, trimethylamine, diethylamine, triethylamine, tripropylamine, and ethanolamine. In some embodiments, the pharmaceutically acceptable base addition salt is chosen from ammonium, potassium, sodium, calcium, and magnesium salts.

[0364] Some embodiments refer to nucleic acid sequence information. It is contemplated that in some embodiments, thymine (T) may be interchanged with uracil (U), or vice versa. For example, some sequences in the sequence listing may recite Ts, but these may be replaced with Us in some embodiments. In some oligonucleotides with nucleic acid sequences that include uracil, the uracil may be replaced with thymine. Similarly, in some oligonucleotides with nucleic acid sequences that include thymine, the thymine may be replaced with uracil. In some embodiments, an oligonucleotide such as an siRNA comprises or consists of RNA. In some embodiments, the oligonucleotide may include DNA. For example, the oligonucleotide may include 2′ deoxyribonucleotides. An ASO may comprise or consist of DNA.

[0365] The section headings used herein are for organizational purposes only and are not to be construed as limiting the subject matter described.

### VI. EXAMPLES

### Example 1: Loss-of-Function Variants in PLIN1 Demonstrate Protective Associations for Lipid Traits and Cardiometabolic Disease

[0366] Variants in PLIN1 were evaluated for associations with blood lipids, cardiometabolic disease and related traits in approximately 452.000 individuals with genotype data from the UK Biobank cohort. Variants evaluated included (1) rs139271800, a rare (AAF=0.001) missense variant (Lue90)Pro; L90P), (2) rs750619494, a rare (AAF=0.0003) frameshift variant (Thr338 AspfsTer51; T338 DfsTer51), (3) rs150822845, a rare (AAF=0.0001) stop-gained variant (Arg93Ter; R93Ter) and (4) rs201579932, a rare (AAF=0.0003) splice acceptor variant. The four variants were considered to be hypomorphic or loss of function variants that may result in a decrease in the abundance or activity of the PLIN1 gene product. Stepwise conditional analyses in multiple traits, as well as direct evaluation of linkage disequilibrium, confirmed that they are independent variants. A PLIN1 loss of function gene burden test was also evaluated which aggregated carriers of rare annotated PLIN1 loss of function variants to increase statistical power.

[0367] The analyses resulted in identification of associations for the individual PLIN1 variants and for the PLIN1 burden test. For example, there were protective associations with multiple cardiometabolic traits. PLIN1 variants were individually or collectively associated with decreased triglycerides, increased HDL, decreased LDL and decreased APOB (Table 3A and 3B).

TABLE 3A
PLIN1 lipid associations

| | | | | Triglycerides | | HDL Cholesterol | |
|---|---|---|---|---|---|---|---|
| | | | | (n = 430,833) | | (n = 396,317) | |
| | | | | P | | P | |
| Variant | Gene | Function | AAF | value | Beta | value | Beta |
| rs139271800 | PLIN1 | Missense; | 0.001 | 2.43E−08 | ↓−0.035 | 6.39E−09 | ↑0.019 |
| | | L90P | | | | | |
| rs750619494 | PLIN1 | Frameshift; | 0.0003 | 3.40E−07 | ↓−0.068 | 3.10E−10 | ↑0.042 |
| | | T338D(fsTer51) | | | | | |
| rs150822845 | PLIN1 | Stop gained; | 0.0001 | 1.26E−03 | ↓−0.063 | 1.69E−06 | ↑0.048 |
| | | R93Ter | | | | | |
| rs201579932 | PLIN1 | Splice donor; | 0.0003 | 5.33E−03 | ↓−0.035 | 6.57E−03 | ↑0.017 |
| | | 964-1G > C | | | | | |
| LoF Burden | PLIN1 | Loss of | 0.0009 | 2.90E−10 | ↓−0.048 | 1.66E−15 | ↑0.031 |
| | | Function | | | | | |
| | | Burden | | | | | |

TABLE 3B
PLIN1 lipid associations

| | |
|---|---|
| LDL Cholesterol | APOB |
| (n = 431,767) | (n = 430,494) |

| Variant | P value | Beta | P value | Beta |
|---|---|---|---|---|
| rs139271800 | 0.038 | ↓-0.007 | 0.029 | ↓-0.007 |
| rs750619494 | 0.050 | ↓-0.014 | 0.013 | ↓-0.016 |
| rs150822845 | 0.373 | ↓-0.009 | 0.360 | ↓-0.009 |
| rs201579932 | 0.466 | ↓-0.005 | 0.701 | ↓-0.002 |
| LoF Burden | 0.048 | ↓-0.008 | 0.066 | ↓-0.007 |

[0368] The PLIN1 loss of function gene burden was additionally associated with decreased risk of myocardial infarction, angina, cerebrovascular disease, peripheral vascular disease and hypertension (Table 3C and 3D).

TABLE 3C
PLIN1 cardiovascular associations

| | | | | Myocardial | | | |
|---|---|---|---|---|---|---|---|
| | | | | Infarction | | Angina | |
| | | | | (n = 20,851) | | (n = 23,116) | |
| | | | | P | | P | |
| Variant | Gene | Function | AAF | value | OR | value | OR |
| LoF | PLIN1 | Loss of | 0.0009 | 0.016 | ↓0.601 | 0.021 | ↓0.654 |
| Burden | | Function | | | | | |
| | | Burden | | | | | |

TABLE 3D
PLIN1 cardiovascular associations

| | | | Peripheral | | | |
|---|---|---|---|---|---|---|
| | Cerebrovascular | | Vascular | | | |
| | Disease | | Disease | | Hypertension | |
| | (n = 29,617) | | (n = 11,752) | | (n = 177,488) | |
| | P | | P | | P | |
| Variant | value | OR | value | OR | value | OR |
| LoF | 0.018 | ↓0.704 | 6.56E−03 | ↓0.523 | 2.09E−03 | ↓0.740 |
| Burden | | | | | | |

[0369] The PLIN1 loss of function gene burden was additionally associated with decreased blood Aspartate Aminotransferase (AST) and decreased risk of type 2 diabetes (Table 3E).

TABLE 3E
PLIN1 liver and diabetes associations

| | | | | Aspartate | | Type 2 | |
|---|---|---|---|---|---|---|---|
| | | | | Aminotransferase | | Diabetes | |
| | | | | (n = 429,246) | | (n = 27,897) | |
| | | | | P | | P | |
| Variant | Gene | Function | AAF | value | Beta | value | OR |
| LoF | PLIN1 | Loss of | 0.0009 | 0.049 | ↓−0.008 | 4.43E−03 | ↓0.788 |
| Burden | | Function | | | | | |
| | | Burden | | | | | |

[0370] These results indicate that loss-of-function of PLIN1 resulted in decreased triglycerides, increased HDL, decreased LDL, decreased APOB and decreased risk of cardiovascular diseases, cerebrovascular diseases and hypertensive diseases, liver diseases and diabetes. These results further indicate that therapeutic inhibition of PLIN1 may result in similar disease-protective effects.

### Example 2: Protective Variants in PLIN1 Result in Less or Truncated PLIN1 Protein

[0371] Protein-coding sequence (CDS) expression constructs encoding for wild type. R93Ter and T338D(fsTer51) proteins were generated. The CDS of the protein coding transcript (ENST00000300055) of PLIN1 was cloned into a pcDNA3.1(+) vector driven by a CMV promoter. Empty vector was used as control. For R93Ter (rs150822845) expression constructs, the A allele replaced the G allele at DNA sequence position chr 15:89671538 (human genome build 38). This created an R93Ter premature stop codon. For T338D(fsTer51) (rs750619494) expression constructs, the C allele replaced the CTTCTGCAGGGT allele at DNA position chr15:89667122 (human genome build 38). This created an T338D frameshift resulting in a premature stop codon.

[0372] Transfections of COS-7 cells were optimized. COS-7 cells were plated in a T75 flask in complete growth media and grown for 48 hours followed by a media change. Cells were then transfected with 15 μg of plasmid DNA and 19 μl of TransIT-2020. Cells were incubated for 48 hours, and then harvested.

[0373] Cell lysates from transfected cells were assayed to evaluate intracellular PLIN1 protein by western blot (FIG. 1). In empty vector transfected COS-7 cells. PLIN1 was not detectable by western blot. In cells transfected with the wild type construct. PLIN1 was detected by western blot as a band between 52-72 kDa. In cells transfected with the R93Ter construct. PLIN1 was not detectable by western blot, suggesting the premature stop codon results in loss of PLIN1 via nonsense mediated decay or degradation at the protein level. In cells transfected with the T338D(fsTer51) construct, a truncated protein product was detected by western Blot as a band ˜40 kDa, near the predicted size of the T338D(fsTer51) truncated product.

[0374] These data provide experimental verification that PLIN1 gene variants associated with decreased triglycerides, increased HDL, decreased LDL, decreased APOB and decreased risk of cardiovascular diseases, cerebrovascular diseases and hypertensive diseases, liver diseases and diabetes, resulted in loss of PLIN1 protein abundance or function. Accordingly, in some cases therapeutic inhibition or modulation of PLIN1 may be an effective genetically-informed method of treatment for these measures and diseases.

### Example 3: Bioinformatic Selection of Sequences in Order to Identify Therapeutic siRNAs to Downmodulate Expression of the PLIN1 mRNA

[0375] Screening sets were defined based on bioinformatic analysis. Therapeutic siRNAs were designed to target human PLIN1, and the PLIN1 sequence of at least one toxicology-relevant species, in this case, the non-human primates (NHP) rhesus and cynomolgus monkeys. Drivers for the design of the screening set were predicted specificity of the siRNAs against the transcriptome of the relevant species as well as cross-reactivity between species. Predicted specificity in human, rhesus monkey, cynomolgus monkey, mouse and rat was determined for sense (S) and antisense (AS) strands. These were assigned a “specificity score” which considers the likelihood of unintended downregulation of any other transcript by full or partial complementarity of an siRNA strand (up to 4 mismatches within positions 2-18) as well as the number and positions of mismatches. Thus, off-target(s) for antisense and sense strands of each siRNA were identified. In addition, the number of potential off-targets was used as an additional specificity factor in the specificity score. As identified, siRNAs with high specificity and a low number of predicted off-targets provide a benefit of increased targeting specificity.

[0376] In addition to selecting siRNA sequences with high sequence specificity to PLIN1 mRNA, siRNA sequences within the seed region were analyzed for similarity to seed regions of known miRNAs, siRNAs can function in a miRNA like manner via base-pairing with complementary sequences within the 3′-UTR of mRNA molecules. The complementarity typically encompasses the 5′-bases at positions 2-7 of the miRNA (seed region). To circumvent siRNAs to act via functional miRNA binding sites, siRNA strands containing natural miRNA seed regions were avoided. Seed regions identified in miRNAs from human, mouse, rat, rhesus monkey, dog, rabbit and pig are referred to as “conserved”. Combining the “specificity score” with miRNA seed analysis yielded a “specificity category”. This is divided into categories 1-4, with 1 having the highest specificity and 4 having the lowest specificity. Each strand of the siRNA is assigned to a specificity category.

[0377] Specificity and species cross-reactivity was assessed for human, cynomolgus monkey, rhesus monkey, mouse and rat PLIN1. The analysis was based on a canonical siRNA design using 19 bases and 17 bases (without considering positions 1 and 19) for cross-reactivity. Full match as well as single mismatch analyses were included.

[0378] Analysis of the human Single Nucleotide Polymorphism (SNP) database (NCBI-DB-SNP) to identify siRNAs targeting regions with known SNPs was also carried out to identify siRNAs that may be non-functional in individuals containing the SNP. Information regarding the positions of SNPs within the target sequence as well as minor allele frequency (MAF) in case data was obtained in this analysis.

[0379] Initial analysis of the relevant PLIN1 mRNA sequence revealed few sequences that fulfil the specificity parameters and at the same time target PLIN1 mRNA in all of the analyzed relevant species. Therefore, it was decided to design independent screening subsets for the therapeutic siRNAs.

[0380] The siRNAs in these subsets recognize the human, cynomolgus monkey, rhesus monkey PLIN1 sequences. Therefore, the siRNAs in these subsets can be used to target human PLIN1 in a therapeutic setting.

[0381] The number of siRNA sequences that can be derived from human PLIN1 mRNA (ENST00000300055.10, SEQ ID NO: 6014) without consideration of specificity or species cross-reactivity was 2898 (sense and antisense strand sequences included in SEQ ID NOS: 1-5796).

[0382] Prioritizing sequences for target specificity, species cross-reactivity, miRNA seed region sequences and SNPs as described above yields subset A. Subset A contains 145 siRNAs whose base sequences are shown in Table 4.

TABLE 4
Sequences in siRNA subset A

| SEQ ID | sense strand sequence | SEQ ID | antisense strand sequence |
|---|---|---|---|
| NO: | (5′-3′) | NO: | (5′-3′) |
| 209 | GCUGCCGGUGGUGAGUGGC | 3107 | GCCACUCACCACCGGCAGC |
| 213 | CCGGUGGUGAGUGGCACCU | 3111 | AGGUGCCACUCACCACCGG |
| 218 | GGUGAGUGGCACCUGCGAA | 3116 | UUCGCAGGUGCCACUCACC |
| 300 | GCCUAUGAGAAGGGCGUGC | 3198 | GCACGCCCUUCUCAUAGGC |
| 301 | CCUAUGAGAAGGGCGUGCA | 3199 | UGCACGCCCUUCUCAUAGG |
| 302 | CUAUGAGAAGGGCGUGCAG | 3200 | CUGCACGCCCUUCUCAUAG |
| 310 | AGGGCGUGCAGAGCGCCAG | 3208 | CUGGCGCUCUGCACGCCCU |
| 311 | GGGCGUGCAGAGCGCCAGU | 3209 | ACUGGCGCUCUGCACGCCC |
| 313 | GCGUGCAGAGCGCCAGUAG | 3211 | CUACUGGCGCUCUGCACGC |
| 341 | CUGGAGCAUGGAGCCGGUG | 3239 | CACCGGCUCCAUGCUCCAG |
| 344 | GAGCAUGGAGCCGGUGGUC | 3242 | GACCACCGGCUCCAUGCUC |
| 378 | CAGUUCACAGCUGCCAAUG | 3276 | CAUUGGCAGCUGUGAACUG |
| 393 | AAUGAGCUGGCCUGCCGAG | 3291 | CUCGGCAGGCCAGCUCAUU |
| 394 | AUGAGCUGGCCUGCCGAGG | 3292 | CCUCGGCAGGCCAGCUCAU |
| 399 | CUGGCCUGCCGAGGCUUGG | 3297 | CCAAGCCUCGGCAGGCCAG |
| 404 | CUGCCGAGGCUUGGACCAC | 3302 | GUGGUCCAAGCCUCGGCAG |
| 405 | UGCCGAGGCUUGGACCACC | 3303 | GGUGGUCCAAGCCUCGGCA |
| 407 | CCGAGGCUUGGACCACCUG | 3305 | CAGGUGGUCCAAGCCUCGG |
| 501 | CUCCGCAGUGCCAGAAACA | 3399 | UGUUUCUGGCACUGCGGAG |
| 502 | UCCGCAGUGCCAGAAACAG | 3400 | CUGUUUCUGGCACUGCGGA |
| 503 | CCGCAGUGCCAGAAACAGC | 3401 | GCUGUUUCUGGCACUGCGG |
| 530 | UCCCAUCGCGAGCACUUCA | 3428 | UGAAGUGCUCGCGAUGGGA |
| 533 | CAUCGCGAGCACUUCAGAC | 3431 | GUCUGAAGUGCUCGCGAUG |
| 534 | AUCGCGAGCACUUCAGACA | 3432 | UGUCUGAAGUGCUCGCGAU |
| 540 | AGCACUUCAGACAAGGUCC | 3438 | GGACCUUGUCUGAAGUGCU |
| 541 | GCACUUCAGACAAGGUCCU | 3439 | AGGACCUUGUCUGAAGUGC |
| 601 | CCAGAGACACUGCGGAAUU | 3499 | AAUUCCGCAGUGUCUCUGG |
| 606 | GACACUGCGGAAUUUGCUG | 3504 | CAGCAAAUUCCGCAGUGUC |
| 610 | CUGCGGAAUUUGCUGCCAA | 3508 | UUGGCAGCAAAUUCCGCAG |
| 616 | AAUUUGCUGCCAACACUCG | 3514 | CGAGUGUUGGCAGCAAAUU |
| 617 | AUUUGCUGCCAACACUCGA | 3515 | UCGAGUGUUGGCAGCAAAU |
| 618 | UUUGCUGCCAACACUCGAG | 3516 | CUCGAGUGUUGGCAGCAAA |
| 619 | UUGCUGCCAACACUCGAGC | 3517 | GCUCGAGUGUUGGCAGCAA |
| 620 | UGCUGCCAACACUCGAGCU | 3518 | AGCUCGAGUGUUGGCAGCA |
| 621 | GCUGCCAACACUCGAGCUG | 3519 | CAGCUCGAGUGUUGGCAGC |
| 622 | CUGCCAACACUCGAGCUGG | 3520 | CCAGCUCGAGUGUUGGCAG |
| 623 | UGCCAACACUCGAGCUGGC | 3521 | GCCAGCUCGAGUGUUGGCA |
| 624 | GCCAACACUCGAGCUGGCC | 3522 | GGCCAGCUCGAGUGUUGGC |
| 625 | CCAACACUCGAGCUGGCCG | 3523 | CGGCCAGCUCGAGUGUUGG |
| 627 | AACACUCGAGCUGGCCGAC | 3525 | GUCGGCCAGCUCGAGUGUU |
| 628 | ACACUCGAGCUGGCCGACU | 3526 | AGUCGGCCAGCUCGAGUGU |
| 629 | CACUCGAGCUGGCCGACUG | 3527 | CAGUCGGCCAGCUCGAGUG |
| 630 | ACUCGAGCUGGCCGACUGG | 3528 | CCAGUCGGCCAGCUCGAGU |
| 631 | CUCGAGCUGGCCGACUGGC | 3529 | GCCAGUCGGCCAGCUCGAG |
| 634 | GAGCUGGCCGACUGGCUUC | 3532 | GAAGCCAGUCGGCCAGCUC |
| 636 | GCUGGCCGACUGGCUUCUG | 3534 | CAGAAGCCAGUCGGCCAGC |
| 649 | CUUCUGGAGGGGCCGACUU | 3547 | AAGUCGGCCCCUCCAGAAG |
| 650 | UUCUGGAGGGGCCGACUUG | 3548 | CAAGUCGGCCCCUCCAGAA |
| 690 | GUGGUGGAGUACCUCCUCC | 3588 | GGAGGAGGUACUCCACCAC |
| 692 | GGUGGAGUACCUCCUCCCU | 3590 | AGGGAGGAGGUACUCCACC |
| 797 | UGGGGCUCUGACCAACACC | 3695 | GGUGUUGGUCAGAGCCCCA |
| 798 | GGGGCUCUGACCAACACCC | 3696 | GGGUGUUGGUCAGAGCCCC |
| 935 | CAUGCAGGCGGUGUCCCGG | 3833 | CCGGGACACCGCCUGCAUG |
| 943 | CGGUGUCCCGGCGGAGGAG | 3841 | CUCCUCCGCCGGGACACCG |
| 1175 | GGCUGUGACAUGGGCACCU | 4073 | AGGUGCCCAUGUCACAGCC |
| 1349 | GCUGUCGCUGAUGGAGCCC | 4247 | GGGCUCCAUCAGCGACAGC |
| 1350 | CUGUCGCUGAUGGAGCCCG | 4248 | CGGGCUCCAUCAGCGACAG |
| 1351 | UGUCGCUGAUGGAGCCCGA | 4249 | UCGGGCUCCAUCAGCGACA |
| 1379 | CCGGGACAUCGACAACCCA | 4277 | UGGGUUGUCGAUGUCCCGG |
| 1400 | AGCCGAGGUCGAGCGCCGG | 4298 | CCGGCGCUCGACCUCGGCU |
| 1401 | GCCGAGGUCGAGCGCCGGG | 4299 | CCCGGCGCUCGACCUCGGC |
| 1404 | GAGGUCGAGCGCCGGGAGG | 4302 | CCUCCCGGCGCUCGACCUC |
| 1551 | GUCGCCACGCCCGCAGCGC | 4449 | GCGCUGCGGGCGUGGCGAC |
| 1589 | CGUGCCCCGCGAGAAGCCA | 4487 | UGGCUUCUCGCGGGGCACG |
| 1607 | AAAGCGCAGGGUCAGCGAC | 4505 | GUCGCUGACCCUGCGCUUU |
| 1608 | AAGCGCAGGGUCAGCGACA | 4506 | UGUCGCUGACCCUGCGCUU |
| 1609 | AGCGCAGGGUCAGCGACAG | 4507 | CUGUCGCUGACCCUGCGCU |
| 1612 | GCAGGGUCAGCGACAGCUU | 4510 | AAGCUGUCGCUGACCCUGC |
| 1613 | CAGGGUCAGCGACAGCUUC | 4511 | GAAGCUGUCGCUGACCCUG |
| 1614 | AGGGUCAGCGACAGCUUCU | 4512 | AGAAGCUGUCGCUGACCCU |
| 1619 | CAGCGACAGCUUCUUCCGG | 4517 | CCGGAAGAAGCUGUCGCUG |
| 1620 | AGCGACAGCUUCUUCCGGC | 4518 | GCCGGAAGAAGCUGUCGCU |
| 1630 | UCUUCCGGCCCAGCGUCAU | 4528 | AUGACGCUGGGCCGGAAGA |
| 1631 | CUUCCGGCCCAGCGUCAUG | 4529 | CAUGACGCUGGGCCGGAAG |
| 1632 | UUCCGGCCCAGCGUCAUGG | 4530 | CCAUGACGCUGGGCCGGAA |
| 1687 | GCAAGAAGAGCUGAGUCGC | 4585 | GCGACUCAGCUCUUCUUGC |
| 1692 | AAGAGCUGAGUCGCCGCAC | 4590 | GUGCGGCGACUCAGCUCUU |
| 1905 | AGCCAGUUUUUAAGGGACA | 4803 | UGUCCCUUAAAAACUGGCU |
| 1907 | CCAGUUUUUAAGGGACACC | 4805 | GGUGUCCCUUAAAAACUGG |
| 1908 | CAGUUUUUAAGGGACACCA | 4806 | UGGUGUCCCUUAAAAACUG |
| 1909 | AGUUUUUAAGGGACACCAG | 4807 | CUGGUGUCCCUUAAAAACU |
| 1911 | UUUUUAAGGGACACCAGAG | 4809 | CUCUGGUGUCCCUUAAAAA |
| 1913 | UUUAAGGGACACCAGAGCC | 4811 | GGCUCUGGUGUCCCUUAAA |
| 1929 | GCCGCAGCCUGCUCUGAUU | 4827 | AAUCAGAGCAGGCUGCGGC |
| 1930 | CCGCAGCCUGCUCUGAUUC | 4828 | GAAUCAGAGCAGGCUGCGG |
| 1934 | AGCCUGCUCUGAUUCUAUG | 4832 | CAUAGAAUCAGAGCAGGCU |
| 1968 | UAAGAGUAAUUGCCUAACU | 4866 | AGUUAGGCAAUUACUCUUA |
| 1969 | AAGAGUAAUUGCCUAACUU | 4867 | AAGUUAGGCAAUUACUCUU |
| 1973 | GUAAUUGCCUAACUUGAUU | 4871 | AAUCAAGUUAGGCAAUUAC |
| 1974 | UAAUUGCCUAACUUGAUUU | 4872 | AAAUCAAGUUAGGCAAUUA |
| 2002 | UUAACCAAACUUGUGGCCA | 4900 | UGGCCACAAGUUUGGUUAA |
| 2076 | CCACGAAUGAGUAACUCCU | 4974 | AGGAGUUACUCAUUCGUGG |
| 2080 | GAAUGAGUAACUCCUGUCA | 4978 | UGACAGGAGUUACUCAUUC |
| 2124 | UUUUGACACAUUCUUAGCA | 5022 | UGCUAAGAAUGUGUCAAAA |
| 2125 | UUUGACACAUUCUUAGCAC | 5023 | GUGCUAAGAAUGUGUCAAA |
| 2126 | UUGACACAUUCUUAGCACU | 5024 | AGUGCUAAGAAUGUGUCAA |
| 2129 | ACACAUUCUUAGCACUGAA | 5027 | UUCAGUGCUAAGAAUGUGU |
| 2131 | ACAUUCUUAGCACUGAACU | 5029 | AGUUCAGUGCUAAGAAUGU |
| 2218 | GCUACUUUGAAGGGAACAA | 5116 | UUGUUCCCUUCAAAGUAGC |
| 2275 | AGUGUCACUUUCUGAGUAC | 5173 | GUACUCAGAAAGUGACACU |
| 2276 | GUGUCACUUUCUGAGUACC | 5174 | GGUACUCAGAAAGUGACAC |
| 2385 | UCACCUGCAUAGUCACUCU | 5283 | AGAGUGACUAUGCAGGUGA |
| 2386 | CACCUGCAUAGUCACUCUU | 5284 | AAGAGUGACUAUGCAGGUG |
| 2390 | UGCAUAGUCACUCUUUUGA | 5288 | UCAAAAGAGUGACUAUGCA |
| 2394 | UAGUCACUCUUUUGAUGCU | 5292 | AGCAUCAAAAGAGUGACUA |
| 2448 | GUAUAGCCACAGUUCAUCC | 5346 | GGAUGAACUGUGGCUAUAC |
| 2501 | AAUCUAGAAAAUGCAUUCA | 5399 | UGAAUGCAUUUUCUAGAUU |
| 2554 | UGUGUCUUUCUCCCCGAGC | 5452 | GCUCGGGGAGAAAGACACA |
| 2639 | GCAGGCACGUGUGUAUGCA | 5537 | UGCAUACACACGUGCCUGC |
| 2646 | CGUGUGUAUGCACUCCCCG | 5544 | CGGGGAGUGCAUACACACG |
| 2647 | GUGUGUAUGCACUCCCCGC | 5545 | GCGGGGAGUGCAUACACAC |
| 2650 | UGUAUGCACUCCCCGCUUG | 5548 | CAAGCGGGGAGUGCAUACA |
| 2653 | AUGCACUCCCCGCUUGUGU | 5551 | ACACAAGCGGGGAGUGCAU |
| 2654 | UGCACUCCCCGCUUGUGUU | 5552 | AACACAAGCGGGGAGUGCA |
| 2660 | CCCCGCUUGUGUUUACACA | 5558 | UGUGUAAACACAAGCGGGG |
| 2750 | UAUAAAUCCCACUCGCUCU | 5648 | AGAGCGAGUGGGAUUUAUA |
| 2752 | UAAAUCCCACUCGCUCUUU | 5650 | AAAGAGCGAGUGGGAUUUA |
| 2753 | AAAUCCCACUCGCUCUUUU | 5651 | AAAAGAGCGAGUGGGAUUU |
| 2754 | AAUCCCACUCGCUCUUUUU | 5652 | AAAAAGAGCGAGUGGGAUU |
| 2785 | AUAACUACUGCAUAAUAUG | 5683 | CAUAUUAUGCAGUAGUUAU |
| 2786 | UAACUACUGCAUAAUAUGG | 5684 | CCAUAUUAUGCAGUAGUUA |
| 2787 | AACUACUGCAUAAUAUGGA | 5685 | UCCAUAUUAUGCAGUAGUU |
| 2788 | ACUACUGCAUAAUAUGGAU | 5686 | AUCCAUAUUAUGCAGUAGU |
| 2793 | UGCAUAAUAUGGAUACGCC | 5691 | GGCGUAUCCAUAUUAUGCA |
| 2794 | GCAUAAUAUGGAUACGCCU | 5692 | AGGCGUAUCCAUAUUAUGC |
| 2796 | AUAAUAUGGAUACGCCUUA | 5694 | UAAGGCGUAUCCAUAUUAU |
| 2797 | UAAUAUGGAUACGCCUUAU | 5695 | AUAAGGCGUAUCCAUAUUA |
| 2798 | AAUAUGGAUACGCCUUAUU | 5696 | AAUAAGGCGUAUCCAUAUU |
| 2799 | AUAUGGAUACGCCUUAUUU | 5697 | AAAUAAGGCGUAUCCAUAU |
| 2800 | UAUGGAUACGCCUUAUUUG | 5698 | CAAAUAAGGCGUAUCCAUA |
| 2802 | UGGAUACGCCUUAUUUGAU | 5700 | AUCAAAUAAGGCGUAUCCA |
| 2803 | GGAUACGCCUUAUUUGAUU | 5701 | AAUCAAAUAAGGCGUAUCC |
| 2804 | GAUACGCCUUAUUUGAUUU | 5702 | AAAUCAAAUAAGGCGUAUC |
| 2806 | UACGCCUUAUUUGAUUUAA | 5704 | UUAAAUCAAAUAAGGCGUA |
| 2807 | ACGCCUUAUUUGAUUUAAC | 5705 | GUUAAAUCAAAUAAGGCGU |
| 2808 | CGCCUUAUUUGAUUUAACU | 5706 | AGUUAAAUCAAAUAAGGCG |
| 2809 | GCCUUAUUUGAUUUAACUA | 5707 | UAGUUAAAUCAAAUAAGGC |
| 2811 | CUUAUUUGAUUUAACUAGU | 5709 | ACUAGUUAAAUCAAAUAAG |
| 2815 | UUUGAUUUAACUAGUUCCC | 5713 | GGGAACUAGUUAAAUCAAA |
| 2817 | UGAUUUAACUAGUUCCCUA | 5715 | UAGGGAACUAGUUAAAUCA |
| 2819 | AUUUAACUAGUUCCCUAAU | 5717 | AUUAGGGAACUAGUUAAAU |
| 2821 | UUAACUAGUUCCCUAAUGA | 5719 | UCAUUAGGGAACUAGUUAA |
| 2824 | ACUAGUUCCCUAAUGAUGG | 5722 | CCAUCAUUAGGGAACUAGU |
| 2825 | CUAGUUCCCUAAUGAUGGA | 5723 | UCCAUCAUUAGGGAACUAG |
| 2826 | UAGUUCCCUAAUGAUGGAC | 5724 | GUCCAUCAUUAGGGAACUA |
| 2827 | AGUUCCCUAAUGAUGGACU | 5725 | AGUCCAUCAUUAGGGAACU |

[0383] The siRNAs in subset A have the following characteristics:
[0384] Cross-reactivity: With 19mer in human PLIN1 mRNA, with 17mer/19mer in NHP PLIN1
[0385] Specificity category: For human and NHP: AS2 or better, SS3 or better
[0386] miRNA seeds: AS+SS strand: seed region not conserved in human, mouse, and rat and not present in >4 species
[0387] Off-target frequency: ≤20 human off-targets matched with 2 mismatches in antisense strand
[0388] SNPs: siRNA target sites do not harbor SNPs with a MAF≥1% (pos, 2-18)

[0389] The siRNA sequences in subset A were selected for more stringent specificity to yield subset B. Subset B includes 119 siRNAs whose base sequences are shown in Table 5.

TABLE 5
Sequences in siRNA subset B

| SEQ ID | sense strand sequence | SEQ ID | antisense strand sequence |
|---|---|---|---|
| NO: | (5′-3′) | NO: | (5′-3′) |
| 209 | GCUGCCGGUGGUGAGUGGC | 3107 | GCCACUCACCACCGGCAGC |
| 213 | CCGGUGGUGAGUGGCACCU | 3111 | AGGUGCCACUCACCACCGG |
| 218 | GGUGAGUGGCACCUGCGAA | 3116 | UUCGCAGGUGCCACUCACC |
| 301 | CCUAUGAGAAGGGCGUGCA | 3199 | UGCACGCCCUUCUCAUAGG |
| 302 | CUAUGAGAAGGGCGUGCAG | 3200 | CUGCACGCCCUUCUCAUAG |
| 311 | GGGCGUGCAGAGCGCCAGU | 3209 | ACUGGCGCUCUGCACGCCC |
| 313 | GCGUGCAGAGCGCCAGUAG | 3211 | CUACUGGCGCUCUGCACGC |
| 341 | CUGGAGCAUGGAGCCGGUG | 3239 | CACCGGCUCCAUGCUCCAG |
| 378 | CAGUUCACAGCUGCCAAUG | 3276 | CAUUGGCAGCUGUGAACUG |
| 393 | AAUGAGCUGGCCUGCCGAG | 3291 | CUCGGCAGGCCAGCUCAUU |
| 399 | CUGGCCUGCCGAGGCUUGG | 3297 | CCAAGCCUCGGCAGGCCAG |
| 404 | CUGCCGAGGCUUGGACCAC | 3302 | GUGGUCCAAGCCUCGGCAG |
| 405 | UGCCGAGGCUUGGACCACC | 3303 | GGUGGUCCAAGCCUCGGCA |
| 407 | CCGAGGCUUGGACCACCUG | 3305 | CAGGUGGUCCAAGCCUCGG |
| 501 | CUCCGCAGUGCCAGAAACA | 3399 | UGUUUCUGGCACUGCGGAG |
| 502 | UCCGCAGUGCCAGAAACAG | 3400 | CUGUUUCUGGCACUGCGGA |
| 530 | UCCCAUCGCGAGCACUUCA | 3428 | UGAAGUGCUCGCGAUGGGA |
| 533 | CAUCGCGAGCACUUCAGAC | 3431 | GUCUGAAGUGCUCGCGAUG |
| 534 | AUCGCGAGCACUUCAGACA | 3432 | UGUCUGAAGUGCUCGCGAU |
| 540 | AGCACUUCAGACAAGGUCC | 3438 | GGACCUUGUCUGAAGUGCU |
| 601 | CCAGAGACACUGCGGAAUU | 3499 | AAUUCCGCAGUGUCUCUGG |
| 606 | GACACUGCGGAAUUUGCUG | 3504 | CAGCAAAUUCCGCAGUGUC |
| 610 | CUGCGGAAUUUGCUGCCAA | 3508 | UUGGCAGCAAAUUCCGCAG |
| 616 | AAUUUGCUGCCAACACUCG | 3514 | CGAGUGUUGGCAGCAAAUU |
| 617 | AUUUGCUGCCAACACUCGA | 3515 | UCGAGUGUUGGCAGCAAAU |
| 618 | UUUGCUGCCAACACUCGAG | 3516 | CUCGAGUGUUGGCAGCAAA |
| 619 | UUGCUGCCAACACUCGAGC | 3517 | GCUCGAGUGUUGGCAGCAA |
| 620 | UGCUGCCAACACUCGAGCU | 3518 | AGCUCGAGUGUUGGCAGCA |
| 621 | GCUGCCAACACUCGAGCUG | 3519 | CAGCUCGAGUGUUGGCAGC |
| 622 | CUGCCAACACUCGAGCUGG | 3520 | CCAGCUCGAGUGUUGGCAG |
| 623 | UGCCAACACUCGAGCUGGC | 3521 | GCCAGCUCGAGUGUUGGCA |
| 624 | GCCAACACUCGAGCUGGCC | 3522 | GGCCAGCUCGAGUGUUGGC |
| 625 | CCAACACUCGAGCUGGCCG | 3523 | CGGCCAGCUCGAGUGUUGG |
| 627 | AACACUCGAGCUGGCCGAC | 3525 | GUCGGCCAGCUCGAGUGUU |
| 628 | ACACUCGAGCUGGCCGACU | 3526 | AGUCGGCCAGCUCGAGUGU |
| 629 | CACUCGAGCUGGCCGACUG | 3527 | CAGUCGGCCAGCUCGAGUG |
| 630 | ACUCGAGCUGGCCGACUGG | 3528 | CCAGUCGGCCAGCUCGAGU |
| 631 | CUCGAGCUGGCCGACUGGC | 3529 | GCCAGUCGGCCAGCUCGAG |
| 649 | CUUCUGGAGGGGCCGACUU | 3547 | AAGUCGGCCCCUCCAGAAG |
| 650 | UUCUGGAGGGGCCGACUUG | 3548 | CAAGUCGGCCCCUCCAGAA |
| 690 | GUGGUGGAGUACCUCCUCC | 3588 | GGAGGAGGUACUCCACCAC |
| 692 | GGUGGAGUACCUCCUCCCU | 3590 | AGGGAGGAGGUACUCCACC |
| 797 | UGGGGCUCUGACCAACACC | 3695 | GGUGUUGGUCAGAGCCCCA |
| 943 | CGGUGUCCCGGCGGAGGAG | 3841 | CUCCUCCGCCGGGACACCG |
| 1350 | CUGUCGCUGAUGGAGCCCG | 4248 | CGGGCUCCAUCAGCGACAG |
| 1351 | UGUCGCUGAUGGAGCCCGA | 4249 | UCGGGCUCCAUCAGCGACA |
| 1379 | CCGGGACAUCGACAACCCA | 4277 | UGGGUUGUCGAUGUCCCGG |
| 1400 | AGCCGAGGUCGAGCGCCGG | 4298 | CCGGCGCUCGACCUCGGCU |
| 1401 | GCCGAGGUCGAGCGCCGGG | 4299 | CCCGGCGCUCGACCUCGGC |
| 1404 | GAGGUCGAGCGCCGGGAGG | 4302 | CCUCCCGGCGCUCGACCUC |
| 1551 | GUCGCCACGCCCGCAGCGC | 4449 | GCGCUGCGGGCGUGGCGAC |
| 1607 | AAAGCGCAGGGUCAGCGAC | 4505 | GUCGCUGACCCUGCGCUUU |
| 1609 | AGCGCAGGGUCAGCGACAG | 4507 | CUGUCGCUGACCCUGCGCU |
| 1612 | GCAGGGUCAGCGACAGCUU | 4510 | AAGCUGUCGCUGACCCUGC |
| 1613 | CAGGGUCAGCGACAGCUUC | 4511 | GAAGCUGUCGCUGACCCUG |
| 1614 | AGGGUCAGCGACAGCUUCU | 4512 | AGAAGCUGUCGCUGACCCU |
| 1619 | CAGCGACAGCUUCUUCCGG | 4517 | CCGGAAGAAGCUGUCGCUG |
| 1620 | AGCGACAGCUUCUUCCGGC | 4518 | GCCGGAAGAAGCUGUCGCU |
| 1630 | UCUUCCGGCCCAGCGUCAU | 4528 | AUGACGCUGGGCCGGAAGA |
| 1631 | CUUCCGGCCCAGCGUCAUG | 4529 | CAUGACGCUGGGCCGGAAG |
| 1632 | UUCCGGCCCAGCGUCAUGG | 4530 | CCAUGACGCUGGGCCGGAA |
| 1687 | GCAAGAAGAGCUGAGUCGC | 4585 | GCGACUCAGCUCUUCUUGC |
| 1692 | AAGAGCUGAGUCGCCGCAC | 4590 | GUGCGGCGACUCAGCUCUU |
| 1905 | AGCCAGUUUUUAAGGGACA | 4803 | UGUCCCUUAAAAACUGGCU |
| 1907 | CCAGUUUUUAAGGGACACC | 4805 | GGUGUCCCUUAAAAACUGG |
| 1908 | CAGUUUUUAAGGGACACCA | 4806 | UGGUGUCCCUUAAAAACUG |
| 1909 | AGUUUUUAAGGGACACCAG | 4807 | CUGGUGUCCCUUAAAAACU |
| 1911 | UUUUUAAGGGACACCAGAG | 4809 | CUCUGGUGUCCCUUAAAAA |
| 1930 | CCGCAGCCUGCUCUGAUUC | 4828 | GAAUCAGAGCAGGCUGCGG |
| 1934 | AGCCUGCUCUGAUUCUAUG | 4832 | CAUAGAAUCAGAGCAGGCU |
| 1968 | UAAGAGUAAUUGCCUAACU | 4866 | AGUUAGGCAAUUACUCUUA |
| 1969 | AAGAGUAAUUGCCUAACUU | 4867 | AAGUUAGGCAAUUACUCUU |
| 1973 | GUAAUUGCCUAACUUGAUU | 4871 | AAUCAAGUUAGGCAAUUAC |
| 1974 | UAAUUGCCUAACUUGAUUU | 4872 | AAAUCAAGUUAGGCAAUUA |
| 2002 | UUAACCAAACUUGUGGCCA | 4900 | UGGCCACAAGUUUGGUUAA |
| 2076 | CCACGAAUGAGUAACUCCU | 4974 | AGGAGUUACUCAUUCGUGG |
| 2080 | GAAUGAGUAACUCCUGUCA | 4978 | UGACAGGAGUUACUCAUUC |
| 2124 | UUUUGACACAUUCUUAGCA | 5022 | UGCUAAGAAUGUGUCAAAA |
| 2125 | UUUGACACAUUCUUAGCAC | 5023 | GUGCUAAGAAUGUGUCAAA |
| 2126 | UUGACACAUUCUUAGCACU | 5024 | AGUGCUAAGAAUGUGUCAA |
| 2275 | AGUGUCACUUUCUGAGUAC | 5173 | GUACUCAGAAAGUGACACU |
| 2276 | GUGUCACUUUCUGAGUACC | 5174 | GGUACUCAGAAAGUGACAC |
| 2386 | CACCUGCAUAGUCACUCUU | 5284 | AAGAGUGACUAUGCAGGUG |
| 2390 | UGCAUAGUCACUCUUUUGA | 5288 | UCAAAAGAGUGACUAUGCA |
| 2394 | UAGUCACUCUUUUGAUGCU | 5292 | AGCAUCAAAAGAGUGACUA |
| 2448 | GUAUAGCCACAGUUCAUCC | 5346 | GGAUGAACUGUGGCUAUAC |
| 2554 | UGUGUCUUUCUCCCCGAGC | 5452 | GCUCGGGGAGAAAGACACA |
| 2646 | CGUGUGUAUGCACUCCCCG | 5544 | CGGGGAGUGCAUACACACG |
| 2647 | GUGUGUAUGCACUCCCCGC | 5545 | GCGGGGAGUGCAUACACAC |
| 2650 | UGUAUGCACUCCCCGCUUG | 5548 | CAAGCGGGGAGUGCAUACA |
| 2653 | AUGCACUCCCCGCUUGUGU | 5551 | ACACAAGCGGGGAGUGCAU |
| 2654 | UGCACUCCCCGCUUGUGUU | 5552 | AACACAAGCGGGGAGUGCA |
| 2660 | CCCCGCUUGUGUUUACACA | 5558 | UGUGUAAACACAAGCGGGG |
| 2750 | UAUAAAUCCCACUCGCUCU | 5648 | AGAGCGAGUGGGAUUUAUA |
| 2752 | UAAAUCCCACUCGCUCUUU | 5650 | AAAGAGCGAGUGGGAUUUA |
| 2753 | AAAUCCCACUCGCUCUUUU | 5651 | AAAAGAGCGAGUGGGAUUU |
| 2754 | AAUCCCACUCGCUCUUUUU | 5652 | AAAAAGAGCGAGUGGGAUU |
| 2787 | AACUACUGCAUAAUAUGGA | 5685 | UCCAUAUUAUGCAGUAGUU |
| 2788 | ACUACUGCAUAAUAUGGAU | 5686 | AUCCAUAUUAUGCAGUAGU |
| 2793 | UGCAUAAUAUGGAUACGCC | 5691 | GGCGUAUCCAUAUUAUGCA |
| 2794 | GCAUAAUAUGGAUACGCCU | 5692 | AGGCGUAUCCAUAUUAUGC |
| 2796 | AUAAUAUGGAUACGCCUUA | 5694 | UAAGGCGUAUCCAUAUUAU |
| 2797 | UAAUAUGGAUACGCCUUAU | 5695 | AUAAGGCGUAUCCAUAUUA |
| 2798 | AAUAUGGAUACGCCUUAUU | 5696 | AAUAAGGCGUAUCCAUAUU |
| 2799 | AUAUGGAUACGCCUUAUUU | 5697 | AAAUAAGGCGUAUCCAUAU |
| 2800 | UAUGGAUACGCCUUAUUUG | 5698 | CAAAUAAGGCGUAUCCAUA |
| 2802 | UGGAUACGCCUUAUUUGAU | 5700 | AUCAAAUAAGGCGUAUCCA |
| 2803 | GGAUACGCCUUAUUUGAUU | 5701 | AAUCAAAUAAGGCGUAUCC |
| 2804 | GAUACGCCUUAUUUGAUUU | 5702 | AAAUCAAAUAAGGCGUAUC |
| 2806 | UACGCCUUAUUUGAUUUAA | 5704 | UUAAAUCAAAUAAGGCGUA |
| 2807 | ACGCCUUAUUUGAUUUAAC | 5705 | GUUAAAUCAAAUAAGGCGU |
| 2811 | CUUAUUUGAUUUAACUAGU | 5709 | ACUAGUUAAAUCAAAUAAG |
| 2817 | UGAUUUAACUAGUUCCCUA | 5715 | UAGGGAACUAGUUAAAUCA |
| 2819 | AUUUAACUAGUUCCCUAAU | 5717 | AUUAGGGAACUAGUUAAAU |
| 2821 | UUAACUAGUUCCCUAAUGA | 5719 | UCAUUAGGGAACUAGUUAA |
| 2824 | ACUAGUUCCCUAAUGAUGG | 5722 | CCAUCAUUAGGGAACUAGU |
| 2825 | CUAGUUCCCUAAUGAUGGA | 5723 | UCCAUCAUUAGGGAACUAG |
| 2826 | UAGUUCCCUAAUGAUGGAC | 5724 | GUCCAUCAUUAGGGAACUA |
| 2827 | AGUUCCCUAAUGAUGGACU | 5725 | AGUCCAUCAUUAGGGAACU |

[0390] The siRNAs in subset B have the following characteristics:
[0391] Cross-reactivity: With 19mer in human PLIN1 mRNA, with 17mer/19mer in NHP PLIN1
[0392] Specificity category: For human and NHP: AS2 or better, SS3 or better
[0393] miRNA seeds: AS+SS strand: seed region not conserved in human, mouse, and rat and not present in >4 species
[0394] Off-target frequency: ≤15 human off-targets matched with 2 mismatches in antisense strand
[0395] SNPs: siRNA target sites do not harbor SNPs with a MAF≥1% (pos, 2-18)

[0396] The siRNA sequences in subset B were further selected for absence of seed regions in the AS strand that are identical to a seed region of known human miRNA to yield subset C. Subset C includes 77 siRNAs whose base sequences are shown in Table 6.

TABLE 6
Sequences in siRNA subset C

| SEQ ID | sense strand sequence | SEQ ID | antisense strand sequence |
|---|---|---|---|
| NO: | (5′-3′) | NO: | (5′-3′) |
| 218 | GGUGAGUGGCACCUGCGAA | 3116 | UUCGCAGGUGCCACUCACC |
| 301 | CCUAUGAGAAGGGCGUGCA | 3199 | UGCACGCCCUUCUCAUAGG |
| 302 | CUAUGAGAAGGGCGUGCAG | 3200 | CUGCACGCCCUUCUCAUAG |
| 311 | GGGCGUGCAGAGCGCCAGU | 3209 | ACUGGCGCUCUGCACGCCC |
| 313 | GCGUGCAGAGCGCCAGUAG | 3211 | CUACUGGCGCUCUGCACGC |
| 341 | CUGGAGCAUGGAGCCGGUG | 3239 | CACCGGCUCCAUGCUCCAG |
| 378 | CAGUUCACAGCUGCCAAUG | 3276 | CAUUGGCAGCUGUGAACUG |
| 393 | AAUGAGCUGGCCUGCCGAG | 3291 | CUCGGCAGGCCAGCUCAUU |
| 399 | CUGGCCUGCCGAGGCUUGG | 3297 | CCAAGCCUCGGCAGGCCAG |
| 404 | CUGCCGAGGCUUGGACCAC | 3302 | GUGGUCCAAGCCUCGGCAG |
| 405 | UGCCGAGGCUUGGACCACC | 3303 | GGUGGUCCAAGCCUCGGCA |
| 501 | CUCCGCAGUGCCAGAAACA | 3399 | UGUUUCUGGCACUGCGGAG |
| 502 | UCCGCAGUGCCAGAAACAG | 3400 | CUGUUUCUGGCACUGCGGA |
| 533 | CAUCGCGAGCACUUCAGAC | 3431 | GUCUGAAGUGCUCGCGAUG |
| 534 | AUCGCGAGCACUUCAGACA | 3432 | UGUCUGAAGUGCUCGCGAU |
| 601 | CCAGAGACACUGCGGAAUU | 3499 | AAUUCCGCAGUGUCUCUGG |
| 617 | AUUUGCUGCCAACACUCGA | 3515 | UCGAGUGUUGGCAGCAAAU |
| 619 | UUGCUGCCAACACUCGAGC | 3517 | GCUCGAGUGUUGGCAGCAA |
| 620 | UGCUGCCAACACUCGAGCU | 3518 | AGCUCGAGUGUUGGCAGCA |
| 621 | GCUGCCAACACUCGAGCUG | 3519 | CAGCUCGAGUGUUGGCAGC |
| 625 | CCAACACUCGAGCUGGCCG | 3523 | CGGCCAGCUCGAGUGUUGG |
| 628 | ACACUCGAGCUGGCCGACU | 3526 | AGUCGGCCAGCUCGAGUGU |
| 629 | CACUCGAGCUGGCCGACUG | 3527 | CAGUCGGCCAGCUCGAGUG |
| 630 | ACUCGAGCUGGCCGACUGG | 3528 | CCAGUCGGCCAGCUCGAGU |
| 631 | CUCGAGCUGGCCGACUGGC | 3529 | GCCAGUCGGCCAGCUCGAG |
| 649 | CUUCUGGAGGGGCCGACUU | 3547 | AAGUCGGCCCCUCCAGAAG |
| 650 | UUCUGGAGGGGCCGACUUG | 3548 | CAAGUCGGCCCCUCCAGAA |
| 797 | UGGGGCUCUGACCAACACC | 3695 | GGUGUUGGUCAGAGCCCCA |
| 1351 | UGUCGCUGAUGGAGCCCGA | 4249 | UCGGGCUCCAUCAGCGACA |
| 1400 | AGCCGAGGUCGAGCGCCGG | 4298 | CCGGCGCUCGACCUCGGCU |
| 1401 | GCCGAGGUCGAGCGCCGGG | 4299 | CCCGGCGCUCGACCUCGGC |
| 1404 | GAGGUCGAGCGCCGGGAGG | 4302 | CCUCCCGGCGCUCGACCUC |
| 1551 | GUCGCCACGCCCGCAGCGC | 4449 | GCGCUGCGGGCGUGGCGAC |
| 1609 | AGCGCAGGGUCAGCGACAG | 4507 | CUGUCGCUGACCCUGCGCU |
| 1612 | GCAGGGUCAGCGACAGCUU | 4510 | AAGCUGUCGCUGACCCUGC |
| 1620 | AGCGACAGCUUCUUCCGGC | 4518 | GCCGGAAGAAGCUGUCGCU |
| 1630 | UCUUCCGGCCCAGCGUCAU | 4528 | AUGACGCUGGGCCGGAAGA |
| 1632 | UUCCGGCCCAGCGUCAUGG | 4530 | CCAUGACGCUGGGCCGGAA |
| 1692 | AAGAGCUGAGUCGCCGCAC | 4590 | GUGCGGCGACUCAGCUCUU |
| 1905 | AGCCAGUUUUUAAGGGACA | 4803 | UGUCCCUUAAAAACUGGCU |
| 1908 | CAGUUUUUAAGGGACACCA | 4806 | UGGUGUCCCUUAAAAACUG |
| 1909 | AGUUUUUAAGGGACACCAG | 4807 | CUGGUGUCCCUUAAAAACU |
| 1911 | UUUUUAAGGGACACCAGAG | 4809 | CUCUGGUGUCCCUUAAAAA |
| 1934 | AGCCUGCUCUGAUUCUAUG | 4832 | CAUAGAAUCAGAGCAGGCU |
| 1969 | AAGAGUAAUUGCCUAACUU | 4867 | AAGUUAGGCAAUUACUCUU |
| 1973 | GUAAUUGCCUAACUUGAUU | 4871 | AAUCAAGUUAGGCAAUUAC |
| 1974 | UAAUUGCCUAACUUGAUUU | 4872 | AAAUCAAGUUAGGCAAUUA |
| 2002 | UUAACCAAACUUGUGGCCA | 4900 | UGGCCACAAGUUUGGUUAA |
| 2080 | GAAUGAGUAACUCCUGUCA | 4978 | UGACAGGAGUUACUCAUUC |
| 2124 | UUUUGACACAUUCUUAGCA | 5022 | UGCUAAGAAUGUGUCAAAA |
| 2126 | UUGACACAUUCUUAGCACU | 5024 | AGUGCUAAGAAUGUGUCAA |
| 2275 | AGUGUCACUUUCUGAGUAC | 5173 | GUACUCAGAAAGUGACACU |
| 2276 | GUGUCACUUUCUGAGUACC | 5174 | GGUACUCAGAAAGUGACAC |
| 2390 | UGCAUAGUCACUCUUUUGA | 5288 | UCAAAAGAGUGACUAUGCA |
| 2448 | GUAUAGCCACAGUUCAUCC | 5346 | GGAUGAACUGUGGCUAUAC |
| 2554 | UGUGUCUUUCUCCCCGAGC | 5452 | GCUCGGGGAGAAAGACACA |
| 2650 | UGUAUGCACUCCCCGCUUG | 5548 | CAAGCGGGGAGUGCAUACA |
| 2660 | CCCCGCUUGUGUUUACACA | 5558 | UGUGUAAACACAAGCGGGG |
| 2750 | UAUAAAUCCCACUCGCUCU | 5648 | AGAGCGAGUGGGAUUUAUA |
| 2752 | UAAAUCCCACUCGCUCUUU | 5650 | AAAGAGCGAGUGGGAUUUA |
| 2754 | AAUCCCACUCGCUCUUUUU | 5652 | AAAAAGAGCGAGUGGGAUU |
| 2787 | AACUACUGCAUAAUAUGGA | 5685 | UCCAUAUUAUGCAGUAGUU |
| 2788 | ACUACUGCAUAAUAUGGAU | 5686 | AUCCAUAUUAUGCAGUAGU |
| 2793 | UGCAUAAUAUGGAUACGCC | 5691 | GGCGUAUCCAUAUUAUGCA |
| 2794 | GCAUAAUAUGGAUACGCCU | 5692 | AGGCGUAUCCAUAUUAUGC |
| 2797 | UAAUAUGGAUACGCCUUAU | 5695 | AUAAGGCGUAUCCAUAUUA |
| 2798 | AAUAUGGAUACGCCUUAUU | 5696 | AAUAAGGCGUAUCCAUAUU |
| 2799 | AUAUGGAUACGCCUUAUUU | 5697 | AAAUAAGGCGUAUCCAUAU |
| 2803 | GGAUACGCCUUAUUUGAUU | 5701 | AAUCAAAUAAGGCGUAUCC |
| 2804 | GAUACGCCUUAUUUGAUUU | 5702 | AAAUCAAAUAAGGCGUAUC |
| 2806 | UACGCCUUAUUUGAUUUAA | 5704 | UUAAAUCAAAUAAGGCGUA |
| 2807 | ACGCCUUAUUUGAUUUAAC | 5705 | GUUAAAUCAAAUAAGGCGU |
| 2811 | CUUAUUUGAUUUAACUAGU | 5709 | ACUAGUUAAAUCAAAUAAG |
| 2821 | UUAACUAGUUCCCUAAUGA | 5719 | UCAUUAGGGAACUAGUUAA |
| 2824 | ACUAGUUCCCUAAUGAUGG | 5722 | CCAUCAUUAGGGAACUAGU |
| 2826 | UAGUUCCCUAAUGAUGGAC | 5724 | GUCCAUCAUUAGGGAACUA |
| 2827 | AGUUCCCUAAUGAUGGACU | 5725 | AGUCCAUCAUUAGGGAACU |

[0397] The siRNAs in subset C have the following characteristics:
[0398] Cross-reactivity: With 19mer in human PLIN1 mRNA, with 17mer/19mer in NHP PLIN1
[0399] Specificity category: For human and NHP: AS2 or better, SS3 or better
[0400] miRNA seeds: AS+SS strand: seed region not conserved in human, mouse, and rat and not present in >4 species. AS strand: seed region not identical to seed region of known human miRNA
[0401] Off-target frequency: ≤15 human off-targets matched with 2 mismatches by antisense strand
[0402] SNPs: siRNA target sites do not harbor SNPs with a MAF≥1% (pos, 2-18)

[0403] The siRNA sequences in subset C were also selected for absence of seed regions in the AS or S strands that are identical to a seed region of known human miRNA to yield subset D. Subset D includes 62 siRNAs whose base sequences are shown in Table 7.

TABLE 7
Sequences in siRNA subset D

| SEQ ID | sense strand sequence | SEQ ID | antisense strand sequence |
|---|---|---|---|
| NO: | (5′-3′) | NO: | (5′-3′) |
| 218 | GGUGAGUGGCACCUGCGAA | 3116 | UUCGCAGGUGCCACUCACC |
| 300 | GCCUAUGAGAAGGGCGUGC | 3198 | GCACGCCCUUCUCAUAGGC |
| 301 | CCUAUGAGAAGGGCGUGCA | 3199 | UGCACGCCCUUCUCAUAGG |
| 302 | CUAUGAGAAGGGCGUGCAG | 3200 | CUGCACGCCCUUCUCAUAG |
| 311 | GGGCGUGCAGAGCGCCAGU | 3209 | ACUGGCGCUCUGCACGCCC |
| 344 | GAGCAUGGAGCCGGUGGUC | 3242 | GACCACCGGCUCCAUGCUC |
| 404 | CUGCCGAGGCUUGGACCAC | 3302 | GUGGUCCAAGCCUCGGCAG |
| 405 | UGCCGAGGCUUGGACCACC | 3303 | GGUGGUCCAAGCCUCGGCA |
| 501 | CUCCGCAGUGCCAGAAACA | 3399 | UGUUUCUGGCACUGCGGAG |
| 503 | CCGCAGUGCCAGAAACAGC | 3401 | GCUGUUUCUGGCACUGCGG |
| 533 | CAUCGCGAGCACUUCAGAC | 3431 | GUCUGAAGUGCUCGCGAUG |
| 534 | AUCGCGAGCACUUCAGACA | 3432 | UGUCUGAAGUGCUCGCGAU |
| 619 | UUGCUGCCAACACUCGAGC | 3517 | GCUCGAGUGUUGGCAGCAA |
| 625 | CCAACACUCGAGCUGGCCG | 3523 | CGGCCAGCUCGAGUGUUGG |
| 628 | ACACUCGAGCUGGCCGACU | 3526 | AGUCGGCCAGCUCGAGUGU |
| 629 | CACUCGAGCUGGCCGACUG | 3527 | CAGUCGGCCAGCUCGAGUG |
| 630 | ACUCGAGCUGGCCGACUGG | 3528 | CCAGUCGGCCAGCUCGAGU |
| 631 | CUCGAGCUGGCCGACUGGC | 3529 | GCCAGUCGGCCAGCUCGAG |
| 634 | GAGCUGGCCGACUGGCUUC | 3532 | GAAGCCAGUCGGCCAGCUC |
| 649 | CUUCUGGAGGGGCCGACUU | 3547 | AAGUCGGCCCCUCCAGAAG |
| 935 | CAUGCAGGCGGUGUCCCGG | 3833 | CCGGGACACCGCCUGCAUG |
| 1351 | UGUCGCUGAUGGAGCCCGA | 4249 | UCGGGCUCCAUCAGCGACA |
| 1400 | AGCCGAGGUCGAGCGCCGG | 4298 | CCGGCGCUCGACCUCGGCU |
| 1401 | GCCGAGGUCGAGCGCCGGG | 4299 | CCCGGCGCUCGACCUCGGC |
| 1608 | AAGCGCAGGGUCAGCGACA | 4506 | UGUCGCUGACCCUGCGCUU |
| 1609 | AGCGCAGGGUCAGCGACAG | 4507 | CUGUCGCUGACCCUGCGCU |
| 1630 | UCUUCCGGCCCAGCGUCAU | 4528 | AUGACGCUGGGCCGGAAGA |
| 1632 | UUCCGGCCCAGCGUCAUGG | 4530 | CCAUGACGCUGGGCCGGAA |
| 1692 | AAGAGCUGAGUCGCCGCAC | 4590 | GUGCGGCGACUCAGCUCUU |
| 1905 | AGCCAGUUUUUAAGGGACA | 4803 | UGUCCCUUAAAAACUGGCU |
| 1908 | CAGUUUUUAAGGGACACCA | 4806 | UGGUGUCCCUUAAAAACUG |
| 1909 | AGUUUUUAAGGGACACCAG | 4807 | CUGGUGUCCCUUAAAAACU |
| 1911 | UUUUUAAGGGACACCAGAG | 4809 | CUCUGGUGUCCCUUAAAAA |
| 1969 | AAGAGUAAUUGCCUAACUU | 4867 | AAGUUAGGCAAUUACUCUU |
| 1973 | GUAAUUGCCUAACUUGAUU | 4871 | AAUCAAGUUAGGCAAUUAC |
| 2002 | UUAACCAAACUUGUGGCCA | 4900 | UGGCCACAAGUUUGGUUAA |
| 2080 | GAAUGAGUAACUCCUGUCA | 4978 | UGACAGGAGUUACUCAUUC |
| 2124 | UUUUGACACAUUCUUAGCA | 5022 | UGCUAAGAAUGUGUCAAAA |
| 2126 | UUGACACAUUCUUAGCACU | 5024 | AGUGCUAAGAAUGUGUCAA |
| 2131 | ACAUUCUUAGCACUGAACU | 5029 | AGUUCAGUGCUAAGAAUGU |
| 2276 | GUGUCACUUUCUGAGUACC | 5174 | GGUACUCAGAAAGUGACAC |
| 2390 | UGCAUAGUCACUCUUUUGA | 5288 | UCAAAAGAGUGACUAUGCA |
| 2448 | GUAUAGCCACAGUUCAUCC | 5346 | GGAUGAACUGUGGCUAUAC |
| 2501 | AAUCUAGAAAAUGCAUUCA | 5399 | UGAAUGCAUUUUCUAGAUU |
| 2650 | UGUAUGCACUCCCCGCUUG | 5548 | CAAGCGGGGAGUGCAUACA |
| 2660 | CCCCGCUUGUGUUUACACA | 5558 | UGUGUAAACACAAGCGGGG |
| 2750 | UAUAAAUCCCACUCGCUCU | 5648 | AGAGCGAGUGGGAUUUAUA |
| 2787 | AACUACUGCAUAAUAUGGA | 5685 | UCCAUAUUAUGCAGUAGUU |
| 2788 | ACUACUGCAUAAUAUGGAU | 5686 | AUCCAUAUUAUGCAGUAGU |
| 2793 | UGCAUAAUAUGGAUACGCC | 5691 | GGCGUAUCCAUAUUAUGCA |
| 2794 | GCAUAAUAUGGAUACGCCU | 5692 | AGGCGUAUCCAUAUUAUGC |
| 2799 | AUAUGGAUACGCCUUAUUU | 5697 | AAAUAAGGCGUAUCCAUAU |
| 2803 | GGAUACGCCUUAUUUGAUU | 5701 | AAUCAAAUAAGGCGUAUCC |
| 2804 | GAUACGCCUUAUUUGAUUU | 5702 | AAAUCAAAUAAGGCGUAUC |
| 2806 | UACGCCUUAUUUGAUUUAA | 5704 | UUAAAUCAAAUAAGGCGUA |
| 2808 | CGCCUUAUUUGAUUUAACU | 5706 | AGUUAAAUCAAAUAAGGCG |
| 2809 | GCCUUAUUUGAUUUAACUA | 5707 | UAGUUAAAUCAAAUAAGGC |
| 2811 | CUUAUUUGAUUUAACUAGU | 5709 | ACUAGUUAAAUCAAAUAAG |
| 2815 | UUUGAUUUAACUAGUUCCC | 5713 | GGGAACUAGUUAAAUCAAA |
| 2821 | UUAACUAGUUCCCUAAUGA | 5719 | UCAUUAGGGAACUAGUUAA |
| 2824 | ACUAGUUCCCUAAUGAUGG | 5722 | CCAUCAUUAGGGAACUAGU |
| 2826 | UAGUUCCCUAAUGAUGGAC | 5724 | GUCCAUCAUUAGGGAACUA |

[0404] The siRNAs in subset D have the following characteristics:
[0405] Cross-reactivity: With 19mer in human PLIN1 mRNA, with 17mer/19mer in NHP PLIN1
[0406] Specificity category: For human and NHP: AS2 or better, SS3 or better
[0407] miRNA seeds: AS+SS strand: seed region not conserved in human, mouse, and rat and not present in >4 species. AS+SS strand: seed region not identical to seed region of known human miRNA
[0408] Off-target frequency: ≤20 human off-targets matched with 2 mismatches by antisense strand
[0409] SNPs: siRNA target sites do not harbor SNPs with a MAF≥1% (pos, 2-18)

[0410] The siRNA sequences in subset D were further selected for more stringent specificity to yield subset E. Subset E includes 51 siRNAs whose base sequences are shown in Table 8.

TABLE 8
Sequences in siRNA subset E

| SEQ ID | sense strand sequence | SEQ ID | antisense strand sequence |
|---|---|---|---|
| NO: | (5′-3′) | NO: | (5′-3′) |
| 218 | GGUGAGUGGCACCUGCGAA | 3116 | UUCGCAGGUGCCACUCACC |
| 301 | CCUAUGAGAAGGGCGUGCA | 3199 | UGCACGCCCUUCUCAUAGG |
| 302 | CUAUGAGAAGGGCGUGCAG | 3200 | CUGCACGCCCUUCUCAUAG |
| 311 | GGGCGUGCAGAGCGCCAGU | 3209 | ACUGGCGCUCUGCACGCCC |
| 404 | CUGCCGAGGCUUGGACCAC | 3302 | GUGGUCCAAGCCUCGGCAG |
| 405 | UGCCGAGGCUUGGACCACC | 3303 | GGUGGUCCAAGCCUCGGCA |
| 501 | CUCCGCAGUGCCAGAAACA | 3399 | UGUUUCUGGCACUGCGGAG |
| 533 | CAUCGCGAGCACUUCAGAC | 3431 | GUCUGAAGUGCUCGCGAUG |
| 534 | AUCGCGAGCACUUCAGACA | 3432 | UGUCUGAAGUGCUCGCGAU |
| 619 | UUGCUGCCAACACUCGAGC | 3517 | GCUCGAGUGUUGGCAGCAA |
| 625 | CCAACACUCGAGCUGGCCG | 3523 | CGGCCAGCUCGAGUGUUGG |
| 628 | ACACUCGAGCUGGCCGACU | 3526 | AGUCGGCCAGCUCGAGUGU |
| 629 | CACUCGAGCUGGCCGACUG | 3527 | CAGUCGGCCAGCUCGAGUG |
| 630 | ACUCGAGCUGGCCGACUGG | 3528 | CCAGUCGGCCAGCUCGAGU |
| 631 | CUCGAGCUGGCCGACUGGC | 3529 | GCCAGUCGGCCAGCUCGAG |
| 649 | CUUCUGGAGGGGCCGACUU | 3547 | AAGUCGGCCCCUCCAGAAG |
| 1351 | UGUCGCUGAUGGAGCCCGA | 4249 | UCGGGCUCCAUCAGCGACA |
| 1400 | AGCCGAGGUCGAGCGCCGG | 4298 | CCGGCGCUCGACCUCGGCU |
| 1401 | GCCGAGGUCGAGCGCCGGG | 4299 | CCCGGCGCUCGACCUCGGC |
| 1609 | AGCGCAGGGUCAGCGACAG | 4507 | CUGUCGCUGACCCUGCGCU |
| 1630 | UCUUCCGGCCCAGCGUCAU | 4528 | AUGACGCUGGGCCGGAAGA |
| 1632 | UUCCGGCCCAGCGUCAUGG | 4530 | CCAUGACGCUGGGCCGGAA |
| 1692 | AAGAGCUGAGUCGCCGCAC | 4590 | GUGCGGCGACUCAGCUCUU |
| 1905 | AGCCAGUUUUUAAGGGACA | 4803 | UGUCCCUUAAAAACUGGCU |
| 1908 | CAGUUUUUAAGGGACACCA | 4806 | UGGUGUCCCUUAAAAACUG |
| 1909 | AGUUUUUAAGGGACACCAG | 4807 | CUGGUGUCCCUUAAAAACU |
| 1911 | UUUUUAAGGGACACCAGAG | 4809 | CUCUGGUGUCCCUUAAAAA |
| 1969 | AAGAGUAAUUGCCUAACUU | 4867 | AAGUUAGGCAAUUACUCUU |
| 1973 | GUAAUUGCCUAACUUGAUU | 4871 | AAUCAAGUUAGGCAAUUAC |
| 2002 | UUAACCAAACUUGUGGCCA | 4900 | UGGCCACAAGUUUGGUUAA |
| 2080 | GAAUGAGUAACUCCUGUCA | 4978 | UGACAGGAGUUACUCAUUC |
| 2124 | UUUUGACACAUUCUUAGCA | 5022 | UGCUAAGAAUGUGUCAAAA |
| 2126 | UUGACACAUUCUUAGCACU | 5024 | AGUGCUAAGAAUGUGUCAA |
| 2276 | GUGUCACUUUCUGAGUACC | 5174 | GGUACUCAGAAAGUGACAC |
| 2390 | UGCAUAGUCACUCUUUUGA | 5288 | UCAAAAGAGUGACUAUGCA |
| 2448 | GUAUAGCCACAGUUCAUCC | 5346 | GGAUGAACUGUGGCUAUAC |
| 2650 | UGUAUGCACUCCCCGCUUG | 5548 | CAAGCGGGGAGUGCAUACA |
| 2660 | CCCCGCUUGUGUUUACACA | 5558 | UGUGUAAACACAAGCGGGG |
| 2750 | UAUAAAUCCCACUCGCUCU | 5648 | AGAGCGAGUGGGAUUUAUA |
| 2787 | AACUACUGCAUAAUAUGGA | 5685 | UCCAUAUUAUGCAGUAGUU |
| 2788 | ACUACUGCAUAAUAUGGAU | 5686 | AUCCAUAUUAUGCAGUAGU |
| 2793 | UGCAUAAUAUGGAUACGCC | 5691 | GGCGUAUCCAUAUUAUGCA |
| 2794 | GCAUAAUAUGGAUACGCCU | 5692 | AGGCGUAUCCAUAUUAUGC |
| 2799 | AUAUGGAUACGCCUUAUUU | 5697 | AAAUAAGGCGUAUCCAUAU |
| 2803 | GGAUACGCCUUAUUUGAUU | 5701 | AAUCAAAUAAGGCGUAUCC |
| 2804 | GAUACGCCUUAUUUGAUUU | 5702 | AAAUCAAAUAAGGCGUAUC |
| 2806 | UACGCCUUAUUUGAUUUAA | 5704 | UUAAAUCAAAUAAGGCGUA |
| 2811 | CUUAUUUGAUUUAACUAGU | 5709 | ACUAGUUAAAUCAAAUAAG |
| 2821 | UUAACUAGUUCCCUAAUGA | 5719 | UCAUUAGGGAACUAGUUAA |
| 2824 | ACUAGUUCCCUAAUGAUGG | 5722 | CCAUCAUUAGGGAACUAGU |
| 2826 | UAGUUCCCUAAUGAUGGAC | 5724 | GUCCAUCAUUAGGGAACUA |

[0411] The siRNAs in subset E have the following characteristics:
[0412] Cross-reactivity: With 19mer in human PLIN1 mRNA, with 17mer/19mer in NHP PLIN1
[0413] Specificity category: For human and NHP: AS2 or better, SS3 or better
[0414] miRNA seeds: AS+SS strand: seed region not conserved in human, mouse, and rat and not present in >4 species. AS+SS strand: seed region not identical to seed region of known human miRNA
[0415] Off-target frequency: ≤15 human off-targets matched with 2 mismatches by antisense strand
[0416] SNPs: siRNA target sites do not harbor SNPs with a MAF≥1% (pos, 2-18)

[0417] Subset F includes 49 siRNAs. The siRNAs in subset F include siRNAs from subset A, and are included in Table 9. In some cases, the sense strand of any of the siRNAs of subset F comprises modification pattern 6S (Table 10). In some cases, the antisense strand of any of the siRNAs of subset F comprises modification pattern 7AS (Table 10). In some cases, the sense strand of any of the siRNAs of subset F contains an alternative modification pattern (Table 11). In some cases, the antisense strand of any of the siRNAs of subset F comprises modification pattern 7AS (Table 11). The siRNAs in subset F may comprise any other modification pattern(s). In Table 10 and Table 11, Nf (e.g. Af, Cf, Gf, Tf, or Uf) is a 2″ fluoro-modified nucleoside, n (e.g. a, c, g, t, or u) is a 2′ O-methyl modified nucleoside, and “s” is a phosphorothioate linkage.

TABLE 9
Sequences in siRNA subset F

| SEQ ID | sense strand sequence | SEQ ID | antisense strand sequence |
|---|---|---|---|
| NO: | (5′-3′) | NO: | (5′-3′) |
| 378 | CAGUUCACAGCUGCCAAUG | 3276 | CAUUGGCAGCUGUGAACUG |
| 540 | AGCACUUCAGACAAGGUCC | 3438 | GGACCUUGUCUGAAGUGCU |
| 601 | CCAGAGACACUGCGGAAUU | 3499 | AAUUCCGCAGUGUCUCUGG |
| 610 | CUGCGGAAUUUGCUGCCAA | 3508 | UUGGCAGCAAAUUCCGCAG |
| 1905 | AGCCAGUUUUUAAGGGACA | 4803 | UGUCCCUUAAAAACUGGCU |
| 1907 | CCAGUUUUUAAGGGACACC | 4805 | GGUGUCCCUUAAAAACUGG |
| 1908 | CAGUUUUUAAGGGACACCA | 4806 | UGGUGUCCCUUAAAAACUG |
| 1911 | UUUUUAAGGGACACCAGAG | 4809 | CUCUGGUGUCCCUUAAAAA |
| 1913 | UUUAAGGGACACCAGAGCC | 4811 | GGCUCUGGUGUCCCUUAAA |
| 1934 | AGCCUGCUCUGAUUCUAUG | 4832 | CAUAGAAUCAGAGCAGGCU |
| 1968 | UAAGAGUAAUUGCCUAACU | 4866 | AGUUAGGCAAUUACUCUUA |
| 1973 | GUAAUUGCCUAACUUGAUU | 4871 | AAUCAAGUUAGGCAAUUAC |
| 1974 | UAAUUGCCUAACUUGAUUU | 4872 | AAAUCAAGUUAGGCAAUUA |
| 2002 | UUAACCAAACUUGUGGCCA | 4900 | UGGCCACAAGUUUGGUUAA |
| 2080 | GAAUGAGUAACUCCUGUCA | 4978 | UGACAGGAGUUACUCAUUC |
| 2124 | UUUUGACACAUUCUUAGCA | 5022 | UGCUAAGAAUGUGUCAAAA |
| 2125 | UUUGACACAUUCUUAGCAC | 5023 | GUGCUAAGAAUGUGUCAAA |
| 2126 | UUGACACAUUCUUAGCACU | 5024 | AGUGCUAAGAAUGUGUCAA |
| 2129 | ACACAUUCUUAGCACUGAA | 5027 | UUCAGUGCUAAGAAUGUGU |
| 2131 | ACAUUCUUAGCACUGAACU | 5029 | AGUUCAGUGCUAAGAAUGU |
| 2218 | GCUACUUUGAAGGGAACAA | 5116 | UUGUUCCCUUCAAAGUAGC |
| 2275 | AGUGUCACUUUCUGAGUAC | 5173 | GUACUCAGAAAGUGACACU |
| 2276 | GUGUCACUUUCUGAGUACC | 5174 | GGUACUCAGAAAGUGACAC |
| 2385 | UCACCUGCAUAGUCACUCU | 5283 | AGAGUGACUAUGCAGGUGA |
| 2390 | UGCAUAGUCACUCUUUUGA | 5288 | UCAAAAGAGUGACUAUGCA |
| 2394 | UAGUCACUCUUUUGAUGCU | 5292 | AGCAUCAAAAGAGUGACUA |
| 2448 | GUAUAGCCACAGUUCAUCC | 5346 | GGAUGAACUGUGGCUAUAC |
| 2752 | UAAAUCCCACUCGCUCUUU | 5650 | AAAGAGCGAGUGGGAUUUA |
| 2753 | AAAUCCCACUCGCUCUUUU | 5651 | AAAAGAGCGAGUGGGAUUU |
| 2785 | AUAACUACUGCAUAAUAUG | 5683 | CAUAUUAUGCAGUAGUUAU |
| 2786 | UAACUACUGCAUAAUAUGG | 5684 | CCAUAUUAUGCAGUAGUUA |
| 2787 | AACUACUGCAUAAUAUGGA | 5685 | UCCAUAUUAUGCAGUAGUU |
| 2793 | UGCAUAAUAUGGAUACGCC | 5691 | GGCGUAUCCAUAUUAUGCA |
| 2797 | UAAUAUGGAUACGCCUUAU | 5695 | AUAAGGCGUAUCCAUAUUA |
| 2798 | AAUAUGGAUACGCCUUAUU | 5696 | AAUAAGGCGUAUCCAUAUU |
| 2800 | UAUGGAUACGCCUUAUUUG | 5698 | CAAAUAAGGCGUAUCCAUA |
| 2802 | UGGAUACGCCUUAUUUGAU | 5700 | AUCAAAUAAGGCGUAUCCA |
| 2803 | GGAUACGCCUUAUUUGAUU | 5701 | AAUCAAAUAAGGCGUAUCC |
| 2804 | GAUACGCCUUAUUUGAUUU | 5702 | AAAUCAAAUAAGGCGUAUC |
| 2806 | UACGCCUUAUUUGAUUUAA | 5704 | UUAAAUCAAAUAAGGCGUA |
| 2807 | ACGCCUUAUUUGAUUUAAC | 5705 | GUUAAAUCAAAUAAGGCGU |
| 2808 | CGCCUUAUUUGAUUUAACU | 5706 | AGUUAAAUCAAAUAAGGCG |
| 2811 | CUUAUUUGAUUUAACUAGU | 5709 | ACUAGUUAAAUCAAAUAAG |
| 2817 | UGAUUUAACUAGUUCCCUA | 5715 | UAGGGAACUAGUUAAAUCA |
| 2819 | AUUUAACUAGUUCCCUAAU | 5717 | AUUAGGGAACUAGUUAAAU |
| 2821 | UUAACUAGUUCCCUAAUGA | 5719 | UCAUUAGGGAACUAGUUAA |
| 2825 | CUAGUUCCCUAAUGAUGGA | 5723 | UCCAUCAUUAGGGAACUAG |
| 2826 | UAGUUCCCUAAUGAUGGAC | 5724 | GUCCAUCAUUAGGGAACUA |
| 2827 | AGUUCCCUAAUGAUGGACU | 5725 | AGUCCAUCAUUAGGGAACU |

TABLE 10
Modified siRNA subset F sequences

| SEQ | | SEQ | |
|---|---|---|---|
| ID | | ID | |
| NO: | sense strand sequence (5′-3′) | NO: | antisense strand sequence (5′-3′) |
| 5797 | CfsasGfuUfcAfcAfgCfuGfcCfaAfuAfsusu | 5846 | usAfsuUfgGfcAfgCfuGfuGfaAfcUfgsusu |
| 5798 | AfsgsCfaCfuUfcAfgAfcAfaGfgUfcAfsusu | 5847 | usGfsaCfcUfuGfuCfuGfaAfgUfgCfususu |
| 5799 | CfscsAfgAfgAfcAfcUfgCfgGfaAfuAfsusu | 5848 | usAfsuUfcCfgCfaGfuGfuCfuCfuGfgsusu |
| 5800 | CfsusGfcGfgAfaUfuUfgCfuGfcCfaAfsusu | 5849 | usUfsgGfcAfgCfaAfaUfuCfcGfcAfgsusu |
| 5801 | AfsgsCfcAfgUfuUfuUfaAfgGfgAfcAfsusu | 5850 | usGfsuCfcCfuUfaAfaAfaCfuGfgCfususu |
| 5802 | CfscsAfgUfuUfuUfaAfgGfgAfcAfcAfsusu | 5851 | usGfsuGfuCfcCfuUfaAfaAfaCfuGfgsusu |
| 5803 | CfsasGfuUfuUfuAfaGfgGfaCfaCfcAfsusu | 5852 | usGfsgUfgUfcCfcUfuAfaAfaAfcUfgsusu |
| 5804 | UfsusUfuUfaAfgGfgAfcAfcCfaGfaAfsusu | 5853 | usUfscUfgGfuGfuCfcCfuUfaAfaAfasusu |
| 5805 | UfsusUfaAfgGfgAfcAfcCfaGfaGfcAfsusu | 5854 | usGfscUfcUfgGfuGfuCfcCfuUfaAfasusu |
| 5806 | AfsgsCfcUfgCfuCfuGfaUfuCfuAfuAfsusu | 5855 | usAfsuAfgAfaUfcAfgAfgCfaGfgCfususu |
| 5807 | UfsasAfgAfgUfaAfuUfgCfcUfaAfcAfsusu | 5856 | usGfsuUfaGfgCfaAfuUfaCfuCfuUfasusu |
| 5808 | GfsusAfaUfuGfcCfuAfaCfuUfgAfuAfsusu | 5857 | usAfsuCfaAfgUfuAfgGfcAfaUfuAfcsusu |
| 5809 | UfsasAfuUfgCfcUfaAfcUfuGfaUfuAfsusu | 5858 | usAfsaUfcAfaGfuUfaGfgCfaAfuUfasusu |
| 5810 | UfsusAfaCfcAfaAfcUfuGfuGfgCfcAfsusu | 5859 | usGfsgCfcAfcAfaGfuUfuGfgUfuAfasusu |
| 5811 | GfsasAfuGfaGfuAfaCfuCfcUfgUfcAfsusu | 5860 | usGfsaCfaGfgAfgUfuAfcUfcAfuUfcsusu |
| 5812 | UfsusUfuGfaCfaCfaUfuCfuUfaGfcAfsusu | 5861 | usGfscUfaAfgAfaUfgUfgUfcAfaAfasusu |
| 5813 | UfsusUfgAfcAfcAfuUfcUfuAfgCfaAfsusu | 5862 | usUfsgCfuAfaGfaAfuGfuGfuCfaAfasusu |
| 5814 | UfsusGfaCfaCfaUfuCfuUfaGfcAfcAfsusu | 5863 | usGfsuGfcUfaAfgAfaUfgUfgUfcAfasusu |
| 5815 | AfscsAfcAfuUfcUfuAfgCfaCfuGfaAfsusu | 5864 | usUfscAfgUfgCfuAfaGfaAfuGfuGfususu |
| 5816 | AfscsAfuUfcUfuAfgCfaCfuGfaAfcAfsusu | 5865 | usGfsuUfcAfgUfgCfuAfaGfaAfuGfususu |
| 5817 | GfscsUfaCfuUfuGfaAfgGfgAfaCfaAfsusu | 5866 | usUfsgUfuCfcCfuUfcAfaAfgUfaGfcsusu |
| 5818 | AfsgsUfgUfcAfcUfuUfcUfgAfgUfaAfsusu | 586 | usUfsaCfuCfaGfaAfaGfuGfaCfaCfususu |
| 5819 | GfsusGfuCfaCfuUfuCfuGfaGfuAfcAfsusu | 5868 | usGfsuAfcUfcAfgAfaAfgUfgAfcAfcsusu |
| 5820 | UfscsAfcCfuGfcAfuAfgUfcAfcUfcAfsusu | 5869 | usGfsaGfuGfaCfuAfuGfcAfgGfuGfasusu |
| 5821 | UfsgsCfaUfaGfuCfaCfuCfuUfuUfgAfsusu | 5870 | usCfsaAfaAfgAfgUfgAfcUfaUfgCfasusu |
| 5822 | UfsasGfuCfaCfuCfuUfuUfgAfuGfcAfsusu | 5871 | usGfscAfuCfaAfaAfgAfgUfgAfcUfasusu |
| 5823 | GfsusAfuAfgCfcAfcAfgUfuCfaUfcAfsusu | 5872 | usGfsaUfgAfaCfuGfuGfgCfuAfuAfcsusu |
| 5824 | UfsasAfaUfcCfcAfcUfcGfcUfcUfuAfsusu | 5873 | usAfsaGfaGfcGfaGfuGfgGfaUfuUfasusu |
| 5825 | AfsasAfuCfcCfaCfuCfgCfuCfuUfuAfsusu | 5874 | usAfsaAfgAfgCfgAfgUfgGfgAfuUfususu |
| 5826 | AfsusAfaCfuAfcUfgCfaUfaAfuAfuAfsusu | 5875 | usAfsuAfuUfaUfgCfaGfuAfgUfuAfususu |
| 5827 | UfsasAfcUfaCfuGfcAfuAfaUfaUfgAfsusu | 5876 | usCfsaUfaUfuAfuGfcAfgUfaGfuUfasusu |
| 5828 | AfsasCfuAfcUfgCfaUfaAfuAfuGfgAfsusu | 5877 | usCfscAfuAfuUfaUfgCfaGfuAfgUfususu |
| 5829 | UfsgsCfaUfaAfuAfuGfgAfuAfcGfcAfsusu | 5878 | usGfscGfuAfuCfcAfuAfuUfaUfgCfasusu |
| 5830 | UfsasAfuAfuGfgAfuAfcGfcCfuUfaAfsusu | 5879 | usUfsaAfgGfcGfuAfuCfcAfuAfuUfasusu |
| 5831 | AfsasUfaUfgGfaUfaCfgCfcUfuAfuAfsusu | 5880 | usAfsuAfaGfgCfgUfaUfcCfaUfaUfususu |
| 5832 | UfsasUfgGfaUfaCfgCfcUfuAfuUfuAfsusu | 5881 | usAfsaAfuAfaGfgCfgUfaUfcCfaUfasusu |
| 5833 | UfsgsGfaUfaCfgCfcUfuAfuUfuGfaAfsusu | 5882 | usUfscAfaAfuAfaGfgCfgUfaUfcCfasusu |
| 5834 | GfsgsAfuAfcGfcCfuUfaUfuUfgAfuAfsusu | 5883 | usAfsuCfaAfaUfaAfgGfcGfuAfuCfcsusu |
| 5835 | GfsasUfaCfgCfcUfuAfuUfuGfaUfuAfsusu | 5884 | usAfsaUfcAfaAfuAfaGfgCfgUfaUfcsusu |
| 5836 | UfsasCfgCfcUfuAfuUfuGfaUfuUfaAfsusu | 5885 | usUfsaAfaUfcAfaAfuAfaGfgCfgUfasusu |
| 5837 | AfscsGfcCfuUfaUfuUfgAfuUfuAfaAfsusu | 5886 | usUfsuAfaAfuCfaAfaUfaAfgGfcGfususu |
| 5838 | CfsgsCfcUfuAfuUfuGfaUfuUfaAfcAfsusu | 5887 | usGfsuUfaAfaUfcAfaAfuAfaGfgCfgsusu |
| 5839 | CfsusUfaUfuUfgAfuUfuAfaCfuAfgAfsusu | 5888 | usCfsuAfgUfuAfaAfuCfaAfaUfaAfgsusu |
| 5840 | UfsgsAfuUfuAfaCfuAfgUfuCfcCfuAfsusu | 5889 | usAfsgGfgAfaCfuAfgUfuAfaAfuCfasusu |
| 5841 | AfsusUfuAfaCfuAfgUfuCfcCfuAfaAfsusu | 5890 | usUfsuAfgGfgAfaCfuAfgUfuAfaAfususu |
| 5842 | UfsusAfaCfuAfgUfuCfcCfuAfaUfgAfsusu | 5891 | usCfsaUfuAfgGfgAfaCfuAfgUfuAfasusu |
| 5843 | CfsusAfgUfuCfcCfuAfaUfgAfuGfgAfsusu | 5892 | usCfscAfuCfaUfuAfgGfgAfaCfuAfgsusu |
| 5844 | UfsasGfuUfcCfcUfaAfuGfaUfgGfaAfsusu | 5893 | usUfscCfaUfcAfuUfaGfgGfaAfcUfasusu |
| 5845 | AfsgsUfuCfcCfuAfaUfgAfuGfgAfcAfsusu | 5894 | usGfsuCfcAfuCfaUfuAfgGfgAfaCfususu |

TABLE 11
Alternatively modified siRNA subset F sequences

| | SEQ | | SEQ | |
|---|---|---|---|---|
| siRNA | ID | | ID | |
| Name | NO: | sense strand sequence (5′-3′) | NO: | antisense strand sequence (5′-3′) |
| ETD01314 | 5895 | csasguucAfcAfGfcugccaauasusu | 5846 | usAfsuUfgGfcAfgCfuGfuGfaAfcUfgsusu |
| ETD01315 | 5896 | asgscacuucAfgAfcaaggucasusu | 5847 | usGfsaCfcUfuGfuCfuGfaAfgUfgCfususu |
| ETD01316 | 5897 | cscsagAfgAfcAfcugcggaauasusu | 5848 | usAfsuUfcCfgCfaGfuGfuCfuCfuGfgsusu |
| ETD01317 | 5898 | csusgcggaaUfuUfgcugccaasusu | 5849 | usUfsgGfcAfgCfaAfaUfuCfcGfcAfgsusu |
| ETD01318 | 5899 | asgsccagUfUfUfUfUfaagggacasusu | 5850 | usGfsuCfcCfuUfaAfaAfaCfuGfgCfususu |
| ETD01319 | 5900 | cscsagUfUfUfUfUfaagggacacasusu | 5851 | usGfsuGfuCfcCfuUfaAfaAfaCfuGfgsusu |
| ETD01320 | 5901 | csasguuuuuAfAfggoacaccasusu | 5852 | usGfsgUfgUfcCfcUfuAfaAfaAfcUfgsusu |
| ETD01321 | 5902 | ususuuuaaGfGfGfAfcaccagaasusu | 5853 | usUfscUfgGfuGfuCfcCfuUfaAfaAfasusu |
| ETD01322 | 5903 | ususuaAfgggAfcAfccagagcasusu | 5854 | usGfscUfcUfgGfuGfuCfcCfuUfaAfasusu |
| ETD01323 | 5904 | asgsccUfgCfUfCfUfgauucuauasusu | 5855 | usAfsuAfgAfaUfcAfgAfgCfaGfgCfususu |
| ETD01324 | 5905 | usasagAfguAfAfuugccuaacasusu | 5856 | usGfsuUfaGfgCfaAfuUfaCfuCfuUfasusu |
| ETD01325 | 5906 | gsusaaUfUfgCfCfuaacuugauasusu | 5857 | usAfsuCfaAfgUfuAfgGfcAfaUfuAfcsusu |
| ETD01326 | 5907 | usasauUfgCfcUfaacuugauuasusu | 5858 | usAfsaUfcAfaGfuUfaGfgCfaAfuUfasusu |
| ETD01327 | 5908 | ususaaccAfaAfcuuguggccasusu | 5859 | usGfsgCfcAfcAfaGfuUfuGfgUfuAfasusu |
| ETD01328 | 5909 | gsasaugAfguAfAfcuccugucasusu | 5860 | usGfsaCfaGfgAfgUfuAfcUfcAfuUfcsusu |
| ETD01329 | 5910 | ususuugaCfaCfaUfucuuagcasusu | 5861 | usGfscUfaAfgAfaUfgUfgUfcAfaAfasusu |
| ETD01330 | 5911 | ususugAfcAfcAfuucuuagcaasusu | 5862 | usUfsgCfuAfaGfaAfuGfuGfuCfaAfasusu |
| ETD01331 | 5912 | ususgaCfaCfaUfUfcuuagcacasusu | 5863 | usGfsuGfcUfaAfgAfaUfgUfgUfcAfasusu |
| ETD01332 | 5913 | ascsacaUfUfcUfUfagcacugaasusu | 5864 | usUfscAfgUfgCfuAfaGfaAfuGfuGfususu |
| ETD01333 | 5914 | ascsauucuuAfGfcacugaacasusu | 5865 | usGfsuUfcAfgUfgCfuAfaGfaAfuGfususu |
| ETD01334 | 5915 | gscsuacuuuGfaAfgggaacaasusu | 5866 | usUfsgUfuCfcCfuUfcAfaAfgUfaGfcsusu |
| ETD01335 | 5916 | asgsugUfcacUfuUfcugaguaasusu | 5867 | usUfsaCfuCfaGfaAfaGfuGfaCfaCfususu |
| ETD01336 | 5917 | gsusgucaCfUfUfUfcugaguacasusu | 5868 | usGfsuAfcUfcAfgAfaAfgUfgAfcAfcsusu |
| ETD01337 | 5918 | uscsaccuGfcAfuAfgucacucasusu | 5869 | usGfsaGfuGfaCfuAfuGfcAfgGfuGfasusu |
| ETD01338 | 5919 | usgscaUfagUfCfaCfucuuuugasusu | 5870 | usCfsaAfaAfgAfgUfgAfcUfaUfgCfasusu |
| ETD01339 | 5920 | usasguCfaCfuCfuuuugaugcasusu | 5871 | usGfscAfuCfaAfaAfgAfgUfgAfcUfasusu |
| ETD01340 | 5921 | gsusauAfgccAfcAfguucaucasusu | 5872 | usGfsaUfgAfaCfuGfuGfgCfuAfuAfcsusu |
| ETD01341 | 5922 | usasaaucccAfcucgcucuuasusu | 5873 | usAfsaGfaGfcGfaGfuGfgGfaUfuUfasusu |
| ETD01342 | 5923 | asasauCfcCfaCfuCfgcucuuuasusu | 5874 | usAfsaAfgAfgCfgAfgUfgGfgAfuUfususu |
| ETD01343 | 5924 | asusaaCfUfaCfUfgCfauaauauasusu | 5875 | usAfsuAfuUfaUfgCfaGfuAfgUfuAfususu |
| ETD01344 | 5925 | usasacuAfcuGfcAfuaauaugasusu | 5876 | usCfsaUfaUfuAfuGfcAfgUfaGfuUfasusu |
| ETD01345 | 5926 | asascuaCfUfgCfaUfaauauggasusu | 5877 | usCfscAfuAfuUfaUfgCfaGfuAfgUfususu |
| ETD01346 | 5927 | usgscauAfAfuAfuggauacgcasusu | 5878 | usGfscGfuAfuCfcAfuAfuUfaUfgCfasusu |
| ETD01347 | 5928 | usasauAfuggAfuAfcgccuuaasusu | 5879 | usUfsaAfgGfcGfuAfuCfcAfuAfuUfasusu |
| ETD01348 | 5929 | asasuaUfggaUfaCfgccuuauasusu | 5880 | usAfsuAfaGfgCfgUfaUfcCfaUfaUfususu |
| ETD01349 | 5930 | usasuggaUfaCfgCfcuuauuuasusu | 5881 | usAfsaAfuAfaGfgCfgUfaUfcCfaUfasusu |
| ETD01350 | 5931 | usgsgauaCfgCfCfuuauuugaasusu | 5882 | usUfscAfaAfuAfaGfgCfgUfaUfcCfasusu |
| ETD01351 | 5932 | gsgsauaCfgCfCfuuauuugauasusu | 5883 | usAfsuCfaAfaUfaAfgGfcGfuAfuCfcsusu |
| ETD01352 | 5933 | gsasuaCfgCfCfUfUfauuugauuasusu | 5884 | usAfsaUfcAfaAfuAfaGfgCfgUfaUfcsusu |
| ETD01353 | 5934 | usascgccuuAfuuugauuuaasusu | 5885 | usUfsaAfaUfcAfaAfuAfaGfgCfgUfasusu |
| ETD01354 | 5935 | ascsgccUfUfaUfuUfgauuuaaasusu | 5886 | usUfsuAfaAfuCfaAfaUfaAfgGfcGfususu |
| ETD01355 | 5936 | csgsccUfUfaUfUfugauuuaacasusu | 5887 | usGfsuUfaAfaUfcAfaAfuAfaGfgCfgsusu |
| ETD01356 | 5937 | CsusuauuuGfAfuuuaacuagasusu | 5888 | usCfsuAfgUfuAfaAfuCfaAfaUfaAfgsusu |
| ETD01357 | 5938 | usgsauUfUfaaCfUfaguucccuasusu | 5889 | usAfsgGfgAfaCfuAfgUfuAfaAfuCfasusu |
| ETD01358 | 5939 | asusuUAfAfcuAfguucccuaaasusu | 5890 | usUfsuAfgGfgAfaCfuAfgUfuAfaAfususu |
| ETD01359 | 5940 | ususaacUfagUfUfcccuaaugasusu | 5891 | usCfsaUfuAfgGfgAfaCfuAfgUfuAfasusu |
| ETD01360 | 5941 | csusaguUfCfCfCfuaaugauggasusu | 5892 | usCfscAfuCfaUfuAfgGfgAfaCfuAfgsusu |
| ETD01361 | 5942 | usasguUfcCfCfUfaaugauggaasusu | 5893 | usUfscCfaUfcAfuUfaGfgGfaAfcUfasusu |
| ETD01362 | 5943 | asgsuucccuAfAfugauggacasusu | 5894 | usGfsuCfcAfuCfaUfuAfgGfgAfaCfususu |

[0418] Any siRNA among any of subsets A-H may comprise any modification pattern described herein. If a sequence is a different number of nucleotides in length than a modification pattern, the modification pattern may still be used with the appropriate number of additional nucleotides added 5′ or 3′ to match the number of nucleotides in the modification pattern. For example, if a sense or antisense strand of the siRNA among any of subsets A-F comprises 19 nucleotides, and a modification pattern comprises 21 nucleotides. UU may be added onto the 5′ end of the sense or antisense strand.

### Example 4: Screening PLIN1 siRNAs for Activity in Human Cells in Culture

[0419] Chemically modified PLIN1 siRNAs cross reactive for human and non-human primate and derived from sequences in siRNA subset F (Table 9) will be assayed for PLIN1 mRNA knockdown activity in cells in culture. UACC-812 (ATCC® CRL-1897™) cells will be seeded in 96-well tissue culture plates at a cell density of 10,000 cells per well in Leibovitz's L-15 Medium (ATCC Catalog No, 30-2008) supplemented with 20% fetal bovine serum and incubated overnight in a water-jacketed, humidified incubator at 37° C. in an atmosphere composed of air. The PLIN1 siRNAs will be individually transfected into UACC-812 cells in duplicate wells at 10 nM final concentration using 0.3 μL Lipofectamine RNAiMax (Fisher) per well. Silencer Select Negative Control #1 (ThermoFisher, Catalog #4390843) will be transfected at 10 nM final concentration as a control. After incubation for 48 hours at 37° C. total RNA will be harvested from each well and cDNA prepared using TaqMan R Fast Advanced Cells-to-CT™ Kit (ThermoFisher. Catalog #A35374) according to the manufacturer's instructions. The level of PLIN1 mRNA from each well will be measured in triplicate by real-time qPCR on a QuantStudio™ 6 Pro Real-Time PCR System using TaqMan Gene Expression Assay for human PLIN1 (ThermoFisher, assay #Hs01106925_m1). The level of PPIA mRNA will be measured using TaqMan Gene Expression Assay (ThermoFisher, assay #Hs99999904_m1) and used to determine relative PLIN1 mRNA levels in each well using the delta-delta Ct method. All data will be normalized to relative PLIN1 mRNA levels in untreated UACC-812 cells.

### Example 5: Determining the IC50 of PLIN1 siRNAs

[0420] The IC50 values for knockdown of PLIN1 mRNA by select PLIN1 siRNAs will be determined in UACC-812 (ATCC® CRL-1897™) cells. The siRNAs will be assayed individually at 30 nM, 10 nM, 3 nM, 1 nM and 0.3 nM, or 3 nM, 1 nM, 0.3 nM, 0.1 nM and 0.03 nM, or 30 nM, 10 nM, 3 nM, 1 nM, 0.3 nM, 0.1 nM and 0.03 nM. The UACC-812 cells will be seeded in 96-well tissue culture plates at a cell density of 7,500 cells per well in DMEM (ATCC Catalog No, 30-2002) supplemented with 20% fetal bovine serum and incubated overnight in a water-jacketed, humidified incubator at 37° C. in an atmosphere composed of air plus 5% carbon dioxide. The PLIN1 siRNAs will be individually transfected into UACC-812 cells in triplicate wells using 0.3 μL Lipofectamine RNAiMax (Fisher) per well. After incubation for 48 hours at 37° C. total RNA will be harvested from each well and cDNA prepared using TaqMan R; Fast Advanced Cells-to-CT™ Kit (ThermoFisher. Catalog #A35374) according to the manufacturer's instructions. The level of PLIN1 mRNA from each well will be measured in triplicate by real-time qPCR on a QuantStudio™ 6 Pro Real-Time PCR System using TaqMan Gene Expression Assay for human PLIN1 (ThermoFisher, assay #Hs01106925_m1). The level of PPIA mRNA will be measured using TaqMan Gene Expression Assay (ThermoFisher, assay #Hs99999904_m1) and used to determine relative PLIN1 mRNA levels in each well using the delta-delta Ct method. All data will be normalized to relative PLIN1 mRNA levels in untreated UACC-812 cells. Curve fit will be accomplish using the [inhibitor]vs. response (three parameters) function in GraphPad Prism software.

### Example 6: siRNA-Mediated Knockdown of PLIN1 in HepG2 Cells

[0421] siRNAs targeted to PLIN1 mRNA that downregulate levels of PLIN1 mRNA may lead to increased expression of adipose triglyceride lipase (ATGL) mRNA and hormone-sensitive lipase (HSL) mRNA, when administered to the cultured human hepatocellular cell line HEPG2.

[0422] On Day 0, the HEPG2 cells are to be seeded at 150,000 cells/mL into a Falcon 24-well tissue culture plate (ThermoFisher Cat. No, 353047) at 0.5 mL per well.

[0423] On Day 1, PLIN1 siRNA and negative control siRNA master mixes are prepared. The PLIN1 siRNA master mix contains 350 μL of Opti-MEM (ThermoFisher Cat. No, 4427037—s1288 Lot No. AS02B02D) and 3.5 μL of a mixture of two PLIN1 siRNAs (10 μM stock). The negative control siRNA master mix contains 350 μL of Opti-MEM and 3.5 μL of negative control siRNA (ThermoFisher Cat. No, 4390843, 10 μM stock). Next, 3 μL of TransIT-X2 (Mirus Cat. No. MIR-6000) is added to each master mix. The mixes are incubated for 15 minutes to allow transfection complexes to form, then 51 μL of the appropriate master mix+TransIT-X2 is added to duplicate wells of HEPG2 cells with a final siRNA concentration of 10) nM.

[0424] On Day 3, 48 hours post transfection, duplicate wells are lysed using the Cells-to-Ct kit according to the manufacturer's protocol (ThermoFisher Cat. No, 4399002) or using protein lysis buffer containing protease and phosphatase inhibitors. For the Cells-to-Ct, cells are washed with 50 μL using cold 1×PBS and lysed by adding 49.5 μL of Lysis Solution and 0.5 μL DNase 1 per well and pipetting up and down 5 times and incubating for 5 minutes at room temperature. The Stop Solution (5 μL/well) is added to each well and mixed by pipetting up and down five times and incubating at room temperature for 2 minutes. The reverse transcriptase reaction is performed using 22.5 μL of the lysate according to the manufacturer's protocol. Samples are stored at −80° C. until real-time qPCR is performed in triplicate using TaqMan Gene Expression Assays (Applied Biosystems FAM/PLIN1. FAM/ATGL and FAM/HSL and using a BioRad CFX96 Cat. No, 1855195).

[0425] A decrease in PLIN1 mRNA expression in the HEPG2 cells is expected after transfection with the PLIN1 siRNAs compared to PLIN1 mRNA levels in HEPG2 cells transfected with the non-specific control siRNA 48 hours after transfection. There is an expected decrease in the amount of ATGL and HSL mRNA. These results will show that the PLIN1 siRNAs elicit knockdown of PLIN1 mRNA in HEPG2 cells and that the decrease in PLIN1 expression is correlated with a decrease in ATGL and HSL mRNAs. This will indicate that beneficial cardiometabolic effects may be obtained upon administration of PLIN1 siRNAs to mammalian subjects such as humans.

### Example 7: ASO-Mediated Knockdown of PLIN1 in HepG2 Cells

[0426] ASOs targeted to PLIN1 mRNA that downregulate levels of PLIN1 mRNA may lead to increased expression of adipose triglyceride lipase (ATGL) mRNA and hormone-sensitive lipase (HSL) mRNA, when administered to the cultured human hepatocellular cell line HEPG2.

[0427] On Day 0, the HEPG2 cells are to be seeded at 150.000 cells/mL into a Falcon 24-well tissue culture plate (ThermoFisher Cat. No, 353047) at 0.5 mL per well.

[0428] On Day 1, PLIN1 ASO and negative control ASO master mixes are prepared. The PLIN1 ASO master mix contains 350 μL of Opti-MEM (ThermoFisher Cat. No, 4427037-s1288 Lot No. AS02B02D) and 3.5 μL of a mixture of two PLIN1 ASOs (10 μM stock). The negative control ASO master mix contains 350 μL of Opti-MEM and 3.5 μL of negative control ASO (ThermoFisher Cat. No, 4390843, 10 μM stock). Next, 3 μL of TransIT-X2 (Mirus Cat. No. MIR-6000) is added to each master mix. The mixes are incubated for 15 minutes to allow transfection complexes to form, then 51 μL of the appropriate master mix+TransIT-X2 is added to duplicate wells of HEPG2 cells with a final ASO concentration of 10 nM.

[0429] On Day 3, 48 hours post transfection, duplicate wells are lysed using the Cells-to-Ct kit according to the manufacturer's protocol (ThermoFisher Cat. No, 4399002) or using protein lysis buffer containing protease and phosphatase inhibitors. For the Cells-to-Ct, cells are washed with 50 μL using cold 1×PBS and lysed by adding 49.5 μL of Lysis Solution and 0.5 μL DNase 1 per well and pipetting up and down 5 times and incubating for 5 minutes at room temperature. The Stop Solution (5 μL/well) is added to each well and mixed by pipetting up and down five times and incubating at room temperature for 2 minutes. The reverse transcriptase reaction is performed using 22.5 μL of the lysate according to the manufacturer's protocol. Samples are stored at −80° C. until real-time qPCR is performed in triplicate using TaqMan Gene Expression Assays (Applied Biosystems FAM/PLIN1. FAM/ATGL and FAM/HSL and using a BioRad CFX96 Cat. No, 1855195).

[0430] A decrease in PLIN1 mRNA expression in the HEPG2 cells is expected after transfection with the PLIN1 ASOs compared to PLIN1 mRNA levels in HEPG2 cells transfected with the non-specific control ASO 48 hours after transfection. There is an expected decrease in the amount of ATGL and HSL mRNA. These results will show that the PLIN1 ASOs elicit knockdown of PLIN1 mRNA in HEPG2 cells and that the decrease in PLIN1 expression is correlated with a decrease in ATGL and HSL mRNAs. This will indicate that beneficial cardiometabolic effects may be obtained upon administration of PLIN1 ASOs to mammalian subjects such as humans.

### Example 8: Inhibition of PLIN1 in a Mouse Model of Hyperlipidemia Using PLIN1 siRNAs or ASOs

[0431] In this experiment, a mouse model of hyperlipidemia and metabolic dysfunction is to be used to evaluate the effect of siRNA or ASO inhibition of PLIN1. The hyperlipidemia and metabolic dysfunction disease model utilizes APOE knockout mice that are fed a high fructose/fat/cholesterol diet to induce hyperlipidemia for 12 weeks prior to treatment. Metabolic status is monitored by measuring fasted serum triglycerides, LDL, HDL, total cholesterol, glucose, ALT, AST and ALP.

[0432] Briefly, mice are divided into five groups: Group 1—a group treated with non-targeting control siRNA. Group 2—a group treated with non-targeting control ASO. Group 3—a group treated with PLIN1 siRNA1, Group 4—a group treated with PLIN1 ASO1, Group 5—a group treated with vehicle. Each group contains eight mice (4 males and 4 females).

[0433] Administration of siRNA or ASO is achieved with a 200 μL subcutaneous injection of siRNA or ASO resuspended in PBS at concentration of 10 μM. On Study Day 0. Group 1 mice are injected subcutaneously with non-targeting control siRNA. Group 2 mice are injected subcutaneously with non-targeting control ASO. Group 3 mice are injected subcutaneously with siRNA1 targeting mouse PLIN1, Group 4 mice are injected subcutaneously with ASO1 targeting mouse PLIN1, and Group 5 mice are injected subcutaneously with vehicle. Every 7 days after the first injection animals from each group will be dosed. Blood samples are taken twice per week: fasted serum triglycerides. LDL. HDL, total cholesterol, glucose. ALT. AST and ALP are measured.

[0434] Six weeks after the start of treatment, the mice are sacrificed by cervical dislocation following an intraperitoneal injection of 0.3 ml Nembutal (5 mg/ml) (Sigma Cat. No, 1507002). Final blood samples are collected, and livers are removed and a section placed in RNAlater for mRNA isolation.

[0435] mRNA is isolated from tissue placed in RNAlater solution using the PureLink kit according to the manufacturer's protocol (ThermoFisher Cat. No, 12183020). The reverse transcriptase reaction is performed according to the manufacturer's protocol. Samples are stored at −80° C. until real-time qPCR is performed in triplicate using TaqMan Gene Expression Assays (Applied Biosystems FAM/PLIN1 using a BioRad CFX96 Cat. No, 1855195).

[0436] A decrease in PLIN1 mRNA expression in the liver tissue from mice dosed with the PLIN1 siRNA1 or ASO1 is expected compared to PLIN1 mRNA levels in the liver tissue from mice dosed with the non-specific controls. There is an expected decrease in fasted serum triglycerides and an increase in fasted serum HDL in mice that receive the PLIN1 siRNA or ASO compared to the mice that receive the non-specific control. These results will show that the PLIN1 siRNA or ASO elicit knockdown of PLIN1 mRNA in liver tissue and that the decrease in PLIN1 expression is correlated with a decrease in fasted serum triglyceride and an increase in fasted serum HDL. These results will further indicate that beneficial cardiometabolic effects may be obtained upon administration of PLIN1 ASOs to primate subjects such as humans.

### Example 9: siRNA-Mediated Knockdown of PLIN1 in Adipose Tissue in a Mice

[0437] 4-7 week old ICR mice (Envigo Labs) mice in Group 1 (n=4) were given 100 μL of phosphate buffered saline (PBS) or given 500 μg of siRNA targeting mouse PLIN1 in 100 μL PBS by a single subcutaneous injection. The siRNA duplexes are depicted in Table 12, and each included a lipid moiety. In the table, Nf (e.g. Af, Cf, Gf, Tf, or Uf) is a 2′ fluoro-modified nucleoside, n (e.g. a, c, g, t, or u) is a 2′ O-methyl modified nucleoside, “s” is a phosphorothioate linkage, and “5Vp” is a 5′ vinylphosphonate. On Day 20, the mice were then euthanized and an abdominal white fat sample from each was collected and placed in RNAlater (ThermoFisher Cat #AM7020) until processing. Total fat RNA was prepared by homogenizing the tissue in homogenization buffer (Maxwell RSC simplyRNA Tissue Kit) using a Percellys 24 tissue homogenizer (Bertin Instruments) set at 5000 rpm for two 10 second cycles. The homogenate was centrifuged for 10′ at 16,000×g at 4C and the lower liquid layer was removed to a fresh tube. The sample was centrifuged two additional times, each time removing the lower liquid layer to a fresh tube. Total RNA from the lysate was purified on a Maxwell RSC 48 platform (Promega Corporation) according to the manufacturer's recommendations. Preparation of cDNA was performed using Quanta qScript cDNA SuperMix (VWR, Catalog #95048-500) according to the manufacturer's instructions. The relative levels of mouse PLIN1 mRNA were assessed by RT-qPCR in triplicate on a QuantStudio™ 6 Pro Real-Time PCR System using TaqMan assays for mouse PLIN1 (ThermoFisher, assay #Mm00558672_m1) and the mouse housekeeping gene PPIA (ThermoFisher, assay #Mm02342430_g1). Data were normalized to the level in animals receiving PBS.

TABLE 12
Example siRNA duplexes

| | | Sense Strand | | |
|---|---|---|---|---|
| | | Sequence | Anti- | |
| | Sense | (5′ to 3′) | sense | Antisense |
| | SEQ | with 5′ | SEQ | Strand |
| SIRNA | ID | Hydrophobic | ID | Sequence |
| Name | NO: | Moiety | NO: | (5′ to 3′) |
| ETD01540 | 5944 | [ETL3]CfsaAfc | 5957 | usUfsgUfcGf |
| | | AfcUfcUfuUfcU | | aGfaAfaGfa |
| | | fcGfaCfaAfsu | | GfUGfUUfgs |
| | | su | | usu |
| ETD01624 | 5944 | [ETL3]CfsaAfc | 5958 | 5VpusUfsgUfc |
| | | AfcUfcUfuUfcU | | GfaGfaAfaGfa |
| | | fcGfaCfaAfsu | | GfuGfUUfgsu |
| | | su | | su |
| ETD01751 | 5945 | [ETL3]CfaAfc | 5958 | 5VpusUfsgUf |
| | | AfcUfcUfuUfc | | cGfaGfaAfa |
| | | UfcGfaCfaAfs | | GfaGfuGfUU |
| | | usu | | fgsusu |

[0438] The results are depicted in Table 13. Addition of 5′ vinylphosphonate (5Vp) resulted in increased potency and enabled delivery to adipose tissue.

TABLE 13
mRNA expression levels

| | Average mRNA relative to |
|---|---|
| siRNA | no treatment control animals |
| ETD01540 | 1.7 |
| ETD01624 | 0.67 |
| ETD01751 | 0.53 |

### Example 10: Knockdown of PLIN1 in Adipose Tissue of Mice Using Cholesterol-Conjugated SiRNA

[0439] 4-6 week old ICR mice (Envigo Labs) mice in Group 1 (n=4) were given 100 μL of phosphate buffered saline (PBS) or 1.5 mg of a cholesterol-conjugated siRNA, ETD01510, targeting mouse PLIN1 in 100 μL PBS by subcutaneous injection. A separate group of mice were given ETD01510 by intravenous injection. The siRNA duplex ETD01510 is depicted in Table 14, and included a hydrophobic moiety. In the table, Nf (e.g. Af, Cf, Gf, Tf, or Uf) is a 2′ fluoro-modified nucleoside, n (e.g. a, c, g, t, or u) is a 2′ O-methyl modified nucleoside, and “s” is a phosphorothioate linkage. On Day 9, the mice were then euthanized and an abdominal white fat sample from each was collected and placed in RNAlater (ThermoFisher Cat #AM7020) until processing. Total fat RNA was prepared by homogenizing the tissue in homogenization buffer (Maxwell RSC simplyRNA Tissue Kit) using a Percellys 24 tissue homogenizer (Bertin Instruments) set at 5000 rpm for two 10 second cycles. The homogenate was centrifuged for 10′ at 16,000×g at 4C and the liquid layer was removed to a fresh tube. The sample was centrifuged two additional times, each time removing the lower liquid layer to a fresh tube. Total RNA from the lysate was purified on a Maxwell RSC 48 platform (Promega Corporation) according to the manufacturer's recommendations. Preparation of cDNA was performed using Quanta qScript cDNA SuperMix (VWR, Catalog #95048-500) according to the manufacturer's instructions. The relative levels of mouse PLIN1 mRNA were assessed by RT-qPCR in triplicate on a QuantStudio™ 6 Pro Real-Time PCR System using TaqMan assays for mouse PLIN1 (ThermoFisher, assay #Mm00558672_m1) and the mouse housekeeping gene PPIA (ThermoFisher, assay #Mm02342430_g1). Data were normalized to the level in animals receiving PBS. The results are shown in Table 15. The cholesterol-conjugated siRNA ETD01510 reduced PLIN1 mRNA in adipose tissue in mice.

TABLE 14
Example siRNA Sequences

| | | Sense | | |
|---|---|---|---|---|
| | | Strand | | |
| | | Sequence | | |
| | | (5′ to 3′) | Anti- | |
| | Sense | with 5′ | sense | Antisense |
| | SEQ | Hydro- | SEQ | Strand |
| SiRNA | ID | phobic | ID | Sequence |
| Name | NO: | Moiety | NO: | (5′ to 3′) |
| ETD01510 | 5946 | [ETL2]Cfsa | 5959 | usUfsgUfcG |
| | | sAfcAfcUfc | | faGfaAfaGf |
| | | UfuUfcUfcG | | aGfuGfuUfg |
| | | faCfaAfsus | | susu |
| | | u | | |

TABLE 15
Relative PLIN1 mRNA Levels in Adipose Tissue of Mice

| | | | | | Mean PLIN1 mRNA |
|---|---|---|---|---|---|
| | | | Dose | | (Normalized to |
| Group | n | Treatment | (mg) | Route | Group 1, Day 9) |
| 1 | 3 | PBS | 0 | SQ | 1.00 |
| 2 | 3 | ETD01510 | 1.5 | SQ | 0.35 |
| 3 | 3 | ETD01510 | 1.5 | IV | 0.64 |

SQ, subcutaneous;
IV, intravenous

### Example 11: Screening of siRNAs Targeting Human PLIN1 mRNA in Mice Transfected with AAV8-TBG-h-PLIN1

[0440] Several siRNAs designed to be cross-reactive with human and cynomolgus monkey PLIN1 mRNA were tested for activity in mice following transfection with an adeno-associated viral vector. The siRNAs were attached to the GalNAc ligand ETL1. The siRNA sequences are shown in Table 16, where “Nf” is a 2′ fluoro-modified nucleoside, “n” is a 2′ O-methyl modified nucleoside, and “s” is a phosphorothioate linkage.

[0441] Six to eight week old female mice (C57Bl/6) were injected with 5 μL of a recombinant adeno-associated virus 8 (AAV8) vector (1.8×10E¹³ genome copies/mL) by the retroorbital route on Day −14. The recombinant AAV8 contained the sequence of the human PLIN1 (NM_002666.5) under the control of the human thyroxine binding globulin promoter in an AAV2 backbone packaged in AAV8 capsid (AAV8-TBG-h-PLIN1). On Day 0, infected mice (n=5) were given a subcutaneous injection of a single 100 μg dose of a GalNAc-conjugated siRNA or PBS as vehicle control.

[0442] Mice were euthanized on Day 10 after subcutaneous injection and a liver sample from each was collected and placed in RNAlater (ThermoFisher Catalog #AM7020) until processing. Total liver RNA was prepared by homogenizing the liver tissue in homogenization buffer (Maxwell RSC simplyRNA Tissue Kit) using a Percellys 24 tissue homogenizer (Bertin Instruments) set at 5000 rpm for two 10 second cycles. Total RNA from the lysate was purified on a Maxwell RSC 48 platform (Promega Corporation) according to the manufacturer's recommendations. Preparation of cDNA was performed using Quanta qScript cDNA SuperMix (VWR, Catalog #95048-500) according to the manufacturer's instructions. The relative levels of liver PLIN1 mRNA were assessed by RT-qPCR in triplicate on a QuantStudio™ 6 Pro Real-Time PCR System using TaqMan assays for human PLIN1 (ThermoFisher, assay #Hs01106925_m1) and the mouse housekeeping gene PPIA (ThermoFisher, assay #Mm02342430_g1) and PerfeCTa® qPCR FastMix®, Low ROX™ (VWR, Catalog #101419-222). Data were normalized to the mean PLIN1 mRNA level in animals receiving PBS. Results are shown in Table 17. Mice injected with ETD01754, ETD01755 or ETD01756 had reduced mean liver PLIN1 mRNA on Day 10 relative to mice receiving PBS.

TABLE 16
Example siRNA Sequences

| | | | Anti- | Anti- |
|---|---|---|---|---|
| | Sense | Sense Strand | sense | sense |
| | SEQ | Sequence | SEQ | Strand |
| SIRNA | ID | (5′-3′) with | ID | Sequence |
| Name | NO: | GalNAc moiety | NO: | (5′-3′) |
| ETD01754 | 5947 | [ETL1]suaagAf | 5960 | usGfsUUfaGf |
| | | GfUAfAfuugccu | | gCfaAfuUfaC |
| | | aacasusu | | fuCfuUfasus |
| | | | | u |
| ETD01755 | 5948 | [ETL1]sguaaUf | 5961 | usAfsuCfaAf |
| | | UfgcCfUfaacuu | | gUfuAfgGfcA |
| | | gauasusu | | faUfUAfcsus |
| | | | | u |
| ETD01756 | 5949 | [ETL1]suuugAf | 5962 | usUfsgCfuAf |
| | | cAfcAfuucuuag | | aGfaAfuGfUG |
| | | caasusu | | fuCfaAfasus |
| | | | | u |

TABLE 17
Relative human PLIN1 mRNA Levels in Livers of Mice

| | | | | Mean PLIN1 mRNA |
|---|---|---|---|---|
| | | | Dose | (Normalized to |
| Group | n | Treatment | (ug) | Group 1, Day 10) |
| 1 | 5 | PBS | 0 | 1.00 |
| 2 | 5 | ETD01754 | 100 | 0.12 |
| 3 | 5 | ETD01755 | 100 | 0.12 |
| 4 | 5 | ETD01756 | 100 | 0.17 |

### Example 12: Screening of Additional siRNAs Targeting Human PLIN1 mRNA in Mice Transfected with AAV8-TBG-h-PLIN1

[0443] Additional siRNAs designed to be cross-reactive with human and cynomolgus monkey PLIN1 mRNA were tested for activity in mice following transfection with an adeno-associated viral vector. The siRNAs were attached to the GalNAc ligand ETL1 or ETL17. The siRNA sequences are shown in Table 18, where “Nf” is a 2′ fluoro-modified nucleoside, “n” is a 2′ O-methyl modified nucleoside, and “s” is a phosphorothioate linkage.

[0444] Six to eight week old female mice (C57Bl/6) were injected with 10 μL of a recombinant adeno-associated virus 8 (AAV8) vector (1.7×10E¹³ genome copies/mL) by the retroorbital route on Day-14. The recombinant AAV8 contained the sequence of the human PLIN1 (NM_002666.5) under the control of the human thyroxine binding globulin promoter in an AAV2 backbone packaged in AAV8 capsid (AAV8-TBG-h-PLIN1). On Day 0, infected mice (n=4) were given a subcutaneous injection of a single 100 μg dose of a GalNAc-conjugated siRNA or PBS as vehicle control.

[0445] Mice were euthanized on Day 10 after subcutaneous injection and a liver sample from each was collected and placed in RNAlater (ThermoFisher Catalog #AM7020) until processing. Total liver RNA was prepared by homogenizing the liver tissue in homogenization buffer (Maxwell RSC simplyRNA Tissue Kit) using a Percellys 24 tissue homogenizer (Bertin Instruments) set at 5000 rpm for two 10 second cycles. Total RNA from the lysate was purified on a Maxwell RSC 48 platform (Promega Corporation) according to the manufacturer's recommendations. Preparation of cDNA was performed using Quanta qScript cDNA SuperMix (VWR, Catalog #95048-500) according to the manufacturer's instructions. The relative levels of liver PLIN1 mRNA were assessed by RT-qPCR in triplicate on a QuantStudio™ 6 Pro Real-Time PCR System using TaqMan assays for human PLIN1 (ThermoFisher, assay #Hs01106925_m1) and the mouse housekeeping gene PPIA (ThermoFisher, assay #Mm02342430_g1) and PerfeCTa® qPCR FastMix®, Low ROX™ (VWR, Catalog #101419-222). Data were normalized to the mean PLIN1 mRNA level in animals receiving PBS. Results are shown in Table 19. All of the siRNAs tested caused a reduction in mean liver PLIN1 mRNA on Day 10 relative to mice receiving PBS. The siRNAs ETD01900, ETD01901 and ETD01902 gave the largest reductions in mean liver PLIN1 mRNA.

TABLE 18
Example siRNA Sequences

| | | Sense | | |
|---|---|---|---|---|
| | | Strand | | |
| | | Sequence | | Anti- |
| | Sense | (5′-3′) | Anti- | sense |
| | SEQ | with | sense | Strand |
| SIRNA | ID | GalNAc | SEQ ID | Sequence |
| Name | NO: | moiety | NO: | (5′-3′) |
| ETD01754 | 5947 | [ETL1]suaagAf | 5960 | usGfsUU |
| | | GfUAfAf | | faGfgCf |
| | | uugccua | | aAfuUfa |
| | | acasusu | | CfuCfuU |
| | | | | fasusu |
| ETD01899 | 5950 | [ETL17]scaguuu | 5963 | usGfsgU |
| | | uuAfaGf | | fgUfcCf |
| | | ggacacc | | cUfuAfa |
| | | asusu | | AfaAfcU |
| | | | | fgsusu |
| ETD01900 | 5951 | ETL17]suuuuuA | 5964 | usUfscU |
| | | fAfGfGf | | fgGfuGf |
| | | gAfcacc | | uCfcCfu |
| | | agaasus | | UfaAfaA |
| | | u | | fasusu |
| ETD01901 | 5952 | [ETL17]suuuUga | 5965 | usGfscU |
| | | CfaCfaU | | faAfgAf |
| | | fucuuag | | aUfgUfg |
| | | casusu | | UfcAfaA |
| | | | | fasusu |
| ETD01902 | 5953 | ETL17]suugaCf | 5966 | usGfsuG |
| | | aCfaUfu | | fcUfaAf |
| | | Cfuuagc | | gAfaUfg |
| | | acasusu | | UfgUfcA |
| | | | | fasusu |
| ETD01903 | 5954 | [ETL17]sacauuc | 5967 | usGfsUU |
| | | uuAfGfc | | fcAfgUf |
| | | acugaac | | gCfuAfa |
| | | asusu | | GfaAfUG |
| | | | | fususu |
| ETD01904 | 5955 | ETL17]sugcaUf | 5968 | usCfsaA |
| | | agUfCfa | | faAfgAf |
| | | Cfucuuu | | gUfgAfc |
| | | ugasusu | | UfaUfgC |
| | | | | fasusu |
| ETD01905 | 5956 | [ETL17]s | 5969 | usCfscA |
| | | aacuaCf | | fuAfuUf |
| | | UfgCfaU | | aUfgCfa |
| | | faauaug | | GfUAfgU |
| | | gasusu | | fususu |

TABLE 19
Relative human PLIN1 mRNA Levels in Livers of Mice

| | | | | Mean PLIN1 mRNA |
|---|---|---|---|---|
| | | | Dose | (Normalized to |
| Group | n | Treatment | (ug) | Group 1, Day 10) |
| 1 | 4 | PBS | 0 | 1.00 |
| 2 | 4 | ETD01754 | 100 | 0.44 |
| 3 | 4 | ETD01899 | 100 | 0.79 |
| 4 | 4 | ETD01900 | 100 | 0.30 |
| 5 | 4 | ETD01901 | 100 | 0.37 |
| 6 | 4 | ETD01902 | 100 | 0.24 |
| 7 | 4 | ETD01903 | 100 | 0.83 |
| 8 | 4 | ETD01904 | 100 | 0.58 |

### Example 13: Oligonucleotide Synthesis

[0446] Oligonucleotides such as siRNAs may be synthesized according to phosphoramidite technology on a solid phase. For example, a K & A oligonucleotide synthesizer may be used. Syntheses may be performed on a solid support made of controlled pore glass (CPG, 500 Å or 600 Å, obtained from AM Chemicals, Oceanside, CA, USA). All 2′-OMe and 2′-F phosphoramidites may be purchased from Hongene Biotech (Union City, CA, USA). All phosphoramidites may be dissolved in anhydrous acetonitrile (100 mM) and molecular sieves (3 Å) may be added, 5-Benzylthio-1H-tetrazole (BTT, 250 mM in acetonitrile) or 5-Ethylthio-1H-tetrazole (ETT, 250 mM in acetonitrile) may be used as activator solution. Coupling times may be 9-18 min (e.g, with a GalNAc such as ETL17), 6 min (e.g, with 2′OMe and 2′F). In order to introduce phosphorothioate linkages, a 100 mM solution of 3-phenyl 1,2,4-dithiazoline-5-one (POS, obtained from Poly Org, Inc., Leominster, Mass., USA) in anhydrous acetonitrile may be employed.

[0447] After solid phase synthesis, the dried solid support may be treated with a 1:1 volume solution of 40 wt. % methylamine in water and 28% ammonium hydroxide solution (Aldrich) for two hours at 30° C. The solution may be evaporated and the solid residue may be reconstituted in water and purified by anionic exchange HPLC using a TKSgel SuperQ-5PW 13u column. Buffer A may be 20 mM Tris, 5 mM EDTA, pH 9.0 and contained 20% Acetonitrile and buffer B may be the same as buffer A with the addition of 1 M sodium chloride. UV traces at 260 nm may be recorded. Appropriate fractions may be pooled then desalted using Sephadex G-25 medium.

[0448] Equimolar amounts of sense and antisense strand may be combined to prepare a duplex. The duplex solution may be prepared in 0.1×PBS (Phosphate-Buffered Saline, 1×, Gibco) The duplex solution may be annealed at 95° C., for 5 min, and cooled to room temperature slowly. Duplex concentration may be determined by measuring the solution absorbance on a UV-Vis spectrometer at 260 nm in 0.1×PBS. For some experiments, a conversion factor may be calculated from an experimentally determined extinction coefficient.

### Example 14: GalNAc Ligand for Hepatocyte Targeting of Oligonucleotides

[0449] Without limiting the disclosure to these individual methods, there are at least two general methods for attachment of multivalent N-acetylgalactosamine (GalNAc) ligands to oligonucleotides: solid or solution-phase conjugations. GalNAc ligands may be attached to solid phase resin for 3″ conjugation or at the 5′ terminus using GalNAc phosphoramidite reagents. GalNAc phosphoramidites may be coupled on solid phase as for other nucleosides in the oligonucleotide sequence at any position in the sequence. Reagents for GalNAc conjugation to oligonucleotides are shown in Table 20.

TABLE 20
GalNAc Conjugation Reagents

| Type of | |
|---|---|
| conjugation | Structure |
| Solid phase 3′ attachment where squiggly line is rest of oligonucleotide chain and right-most OH is where attachment\grave{ } to solid phase is. | [chemical structure] |
| | This GalNAc ligand may be referred to as “GalNAc23” or “GalNAc#23.” |
| Solid phase 5′ attachment phosphoramidite | [chemical structure] |
| Solid phase 5′ attachment Phosphoramidite | [chemical structure] |
| Solution phase Carboxylic acid for amide coupling anywhere on oligonucleotide | [chemical structure] |
| | Where Ac is an acetyl group or other hydroxyl protecting group that can be removed |
| | under basic, acid or reducing conditions. |

[0450] In solution phase conjugation, the oligonucleotide sequence—including a reactive conjugation site—is formed on the resin. The oligonucleotide is then removed from the resin and GalNAc is conjugated to the reactive site.

[0451] The carboxy GalNAc derivatives may be coupled to amino-modified oligonucleotides. The peptide coupling conditions are known to the skilled in the art using a carbodiimide coupling agent like DCC (N,N′-Dicyclohexylcarbodiimide). EDC (N-(3-dimethylaminopropyl)-N′-ethylcarbodiimide) or EDC.HCl (N-(3-dimethylaminopropyl)-N′-ethylcarbodiimide hydrochloride and an additive like HOBt (1-hydroxy benztriazole). HOSu (N-hydroxysuccinimide). TBTU (N,N,N′,N′-Tetramethyl-O-(benzotriazol-1-yl)uronium tetrafluoroborate. HBTU (2-(1H-benzotriazol-1-yl)-1,1,3,3-tetramethyluronium hexafluorophosphate) or HOAt (1-Hydroxy-7-azabenzotriazole and common combinations thereof such as TBTU/HOBt or HBTU/HOAt to form activated amine-reactive esters.

[0452] Amine groups may be incorporated into oligonucleotides using a number of known, commercially available reagents at the 5′ terminus, 3′ terminus or anywhere in between.

[0453] Non-limiting examples of reagents for oligonucleotide synthesis to incorporate an amino group include:
[0454] 5′ attachment:
[0455] 6-(4-Monomethoxytritylamino)hexyl-(2-cyanoethyl)-(N,N-diisopropyl)-phosphoramidite CAS Number: 114616-27-2
[0456] 5′-Amino-Modifier TEG CE-Phosphoramidite
[0457] 10-(O-trifluoroacetamido-N-ethyl)-triethyleneglycol-1-[(2-cyanoethyl)-(N,N-diisopropyl)]-phosphoramidite
[0458] 3′ attachment:
[0459] 3′-Amino-Modifier Serinol CPG
[0460] 3-Dimethoxytrityloxy-2-(3-(fluorenylmethoxy carbonylamino)propanamido)propyl-1-O-succinyl-long chain alkylamino-CPG (where CPG stands for controlled-pore glass and is the solid support)
[0461] Amino-Modifier Serinol Phosphoramidite
[0462] 3-Dimethoxytrityloxy-2-(3-(fluorenylmethoxy carbonylamino)propanamido)propyl-1-O-(2-cyanoethyl)-(N,N-diisopropyl)-phosphoramidite

[0463] Internal (base modified):
[0464] Amino-Modifier C6 dT
[0465] 5′-Dimethoxytrityl-5-[N-(trifluoracetylaminohexyl)-3-acrylamido]-2′-deoxyUridine,3′-[(2-cyanoethyl)-(N,N-diisopropyl)]-phosphoramidite. CAS Number: 178925-21-8

[0466] Solution phase conjugations may occur after oligonucleotide synthesis via reactions between non-nucleosidic nucleophilic functional groups that are attached to the oligonucleotide and electrophilic GalNAc reagents. Examples of nucleophilic groups include amines and thiols, and examples of electrophilic reagents include activated esters (e.g. N-hydroxysuccinimide, pentafluorophenyl) and maleimides.

### Example 15: GalNAc Ligands for Hepatocyte Targeting of Oligonucleotides

[0467] Without limiting the disclosure to these individual methods, there are at least two general methods for attachment of multivalent N-acetylgalactosamine (GalNAc) ligands to oligonucleotides: solid or solution-phase conjugations. GalNAc ligands may be attached to solid phase resin for 3″ conjugation or at the 5′ terminus using GalNAc phosphoramidite reagents. GalNAc phosphoramidites may be coupled on solid phase as for other nucleosides in the oligonucleotide sequence at any position in the sequence. A non-limiting example of a phosphoramidite reagent for GalNAc conjugation to a 5′ end oligonucleotide is shown in Table 21.

TABLE 21
GalNAc Conjugation Reagent

| Type of | |
|---|---|
| conjugation | Structure |
| Solid phase 5′ attachment phosphor- amidite | [chemical structure] |

[0468] The following includes examples of synthesis reactions used to create a GalNAc moiety: Scheme for the preparation of NAcegal-Linker-TMSOTf

[chemical structure]

### General Procedure for Preparation of Compound 2A

[chemical structure]

[0470] To a solution of Compound 1A (500 g, 4.76 mol, 476 mL) in 2-Methyl-THF (2.00 L) is added CbzCl (406 g, 2.38 mol, 338 mL) in 2-Methyl-THF (750 mL) dropwise at 0° C. The mixture is stirred at 25° C., for 2 hrs under N₂ atmosphere. TLC (DCM:MeOH=20:1, PMA) may indicate CbzCl is consumed completely and one new spot (R_{f}=0.43) formed. The reaction mixture is added HCl/EtOAc (1 N, 180 mL) and stirred for 30 mins, white solid is removed by filtration through celite, the filtrate is concentrated under vacuum to give Compound 2A (540 g, 2.26 mol, 47.5% yield) as a pale yellow oil and used into the next step without further purification, ¹HNMR: δ 7.28-7.41 (m, 5H), 5.55 (br s, 1H), 5.01-5.22 (m, 2H), 3.63-3.80 (m, 2H), 3.46-3.59 (m, 4H), 3.29-3.44 (m, 2H), 2.83-3.02 (m, 1H).

### General Procedure for Preparation of Compound 4A

[chemical structure]

[0472] To a solution of Compound 3A (1.00 kg, 4.64 mol, HCl) in pyridine (5.00 L) is added acetyl acetate (4.73 kg, 46.4 mol, 4.34 L) dropwise at 0° C. under N₂ atmosphere. The mixture is stirred at 25° C., for 16 hrs under N₂ atmosphere. TLC (DCM:MeOH=20:1, PMA) indicated Compound 3A is consumed completely and two new spots (R_{f}=0.35) formed. The reaction mixture is added to cold water (30.0 L) and stirred at 0° C., for 0.5 hr, white solid formed, filtered and dried to give Compound 4A (1.55 kg, 3.98 mol, 85.8% yield) as a white solid and used in the next step without further purification, ¹H NMR: δ 7.90 (d, J=9.29 Hz, 1H), 5.64 (d, J=8.78 Hz, 1H), 5.26 (d, J=3.01 Hz, 1H), 5.06 (dd, J=11.29, 3.26 Hz, 1H), 4.22 (t, J=6.15 Hz, 1H), 3.95-4.16 (m, 3H), 2.12 (s, 3H), 2.03 (s, 3H), 1.99 (s, 3H), 1.90 (s, 3H), 1.78 (s, 3H).

### General Procedure for Preparation of Compound 5A

[chemical structure]

[0474] To a solution of Compound 4A (300 g, 771 mmol) in DCE (1.50 L) is added TMSOTf (257 g 1.16 mol, 209 mL) and stirred for 2 hrs at 60° C., and then stirred for 1 hr at 25° C. Compound 2A (203 g, 848 mmol) is dissolved in DCE (1.50 L) and added 4 Å powder molecular sieves (150 g) stirring for 30 mins under N₂ atmosphere. Then the solution of Compound 4A in DCE is added dropwise to the mixture at 0° C. The mixture is stirred at 25° C., for 16 hrs under N₂ atmosphere. TLC (DCM:MeOH=25:1, PMA) indicated Compound 4A is consumed completely and new spot (R_{f}=0.24) formed. The reaction mixture is filtered and washed with sat. NaHCO₃ (2.00 L), water (2.00 L) and sat. brine (2.00 L). The organic layer is dried over anhydrous Na₂SO4, filtered and concentrated under reduced pressure to give a residue. The residue is triturated with 2-Me-THE/heptane (5/3, v/v, 1.80 L) for 2 hrs, filtered and dried to give Compound 5A (225 g, 389 mmol, 50.3% yield, 98.4% purity) as a white solid, ¹H NMR: δ 7.81 (d, J=9.29 Hz, 1H), 7.20-7.42 (m, 6H), 5.21 (d, J=3.26 Hz, 1H), 4.92-5.05 (m, 3H), 4.55 (d, J=8.28 Hz, 1H), 3.98-4.07 (m, 3H), 3.82-3.93 (m, 1H), 3.71-3.81 (m, 1H), 3.55-3.62 (m, 1H), 3.43-3.53 (m, 2H), 3.37-3.43 (m, 2H), 3.14 (q, J=5.77 Hz, 2H), 2.10 (s, 3H), 1.99 (s, 3H), 1.89 (s, 3H), 1.77 (s, 3H).

### General Procedure for Preparation of NAcegal-Linker-Tosylate Salt

[chemical structure]

[0476] To a solution of Compound 5A (200 g, 352 mmol) in THF (1.0 L) is added dry Pd/C (15.0 g, 10% purity) and TsOH (60.6 g, 352 mmol) under N₂ atmosphere. The suspension is degassed under vacuum and purged with H₂ several times. The mixture is stirred at 25° C., for 3 hrs under H₂ (45 psi) atmosphere. TLC (DCM:MeOH=10:1, PMA) indicated Compound 5A is consumed completely and one new spot (R_{f}=0.04) is formed. The reaction mixture is filtered and concentrated (≤40° C.) under reduced pressure to give a residue. Diluted with anhydrous DCM (500 mL, dried overnight with 4 Å molecular sieves (dried at 300° C., for 12 hrs)) and concentrate to give a residue and run Karl Fisher (KF) to check for water content. This is repeated 3 times with anhydrous DCM (500 mL) dilutions and concentration to give NAcegal-Linker-TMSOTf (205 g, 95.8% yield, TsOH salt) as a foamy white solid, ¹H NMR: δ 7.91 (d, J=9.03 Hz, 1H), 7.53-7.86 (m, 2H), 7.49 (d, J=8.03 Hz, 2H), 7.13 (d, J=8.03 Hz, 2H), 5.22 (d, J=3.26 Hz, 1H), 4.98 (dd, J=11.29, 3.26 Hz, 1H), 4.57 (d, J=8.53 Hz, 1H), 3.99-4.05 (m, 3H), 3.87-3.94 (m, 1H), 3.79-3.85 (m, 1H), 3.51-3.62 (m, 5H), 2.96 (br t, J=5.14 Hz, 2H), 2.29 (s, 3H), 2.10 (s, 3H), 2.00 (s, 3H), 1.89 (s, 3H), 1.78 (s, 3H).

### Scheme for the Preparation of TRIS-PEG2-CBZ

[chemical structure]

[chemical structure]

### General Procedure for Preparation of Compound 5B

[chemical structure]

[0479] To a solution of Compound 4B (400 g, 1.67 mol, 1.00 eq) and NaOH (10 M, 16.7 mL, 0.10 eq) in THF (2.00 L) is added Compound 4B_2 (1.07 kg, 8.36 mol, 1.20 L, 5.00 eq), the mixture is stirred at 30° C., for 2 hrs. LCMS showed the desired MS is given. Five batches of solution are combined to one batch, then the mixture is diluted with water (6.00 L), extracted with ethyl acetate (3.00 L*3), the combined organic layer is washed with brine (3.00 L), dried over Na₂SO4, filtered and concentrated under vacuum. The crude is purified by column chromatography (SiO₂, petroleum ether:ethyl acetate=100:1-10:1, R_{f}=0.5) to give Compound 5B (2.36 kg, 6.43 mol, 76.9% yield) as light yellow oil. HNMR: δ 7.31-7.36 (m, 5H), 5.38 (s, 1H), 5.11-5.16 (m, 2H), 3.75 (t, J=6.4 Hz), 3.54-3.62 (m, 6H), 3.39 (d, J=5.2 Hz), 2.61 (t, J=6.0 Hz).

General Procedure for Preparation of 3-oxo-1-phenyl-2,7,10-trioxa-4-azatridecan-13-oic Acid (Compound 2B Below)

[chemical structure]

[0480] To a solution of Compound 5B (741 g, 2.02 mol, 1.00 eq) in DCM (2.80 L) is added TFA (1.43 kg, 12.5 mol, 928 mL, 6.22 eq), the mixture is stirred at 25° C., for 3 hrs. LCMS showed the desired MS is given. The mixture is diluted with DCM (5.00 L), washed with water (3.00 L*3), brine (2.00 L), the combined organic layer is dried over Na₂SO4, filtered and concentrated under vacuum to give Compound 2B (1800 g, crude) as light yellow oil. HNMR: δ 9.46 (s, 5H), 7.27-7.34 (m, 5H), 6.50-6.65 (m, 1H), 5.71 (s, 1H), 5.10-5.15 (m, 2H), 3.68-3.70 (m, 14H), 3.58-3.61 (m, 6H), 3.39 (s, 2H), 2.55 (s, 6H), 2.44 (s, 2H).

### General Procedure for Preparation of Compound 3B

[chemical structure]

[0482] To a solution of Compound 2B (375 g, 999 mmol, 83.0% purity, 1.00 eq) in DCM (1.80 L) is added HATU (570 g, 1.50 mol, 1.50 eq) and DIEA (258 g, 2.00 mol, 348 mL, 2.00 eq) at 0° C., the mixture is stirred at 0° C., for 30 min, then Compound 1B (606 g, 1.20 mol, 1.20 eq) is added, the mixture is stirred at 25° C., for 1 hr. LCMS showed desired MS is given. The mixture is combined to one batch, then the mixture is diluted with DCM (5.00 L), washed with 1 N HCl aqueous solution (2.00 L*2), then the organic layer is washed with saturated Na₂CO₃ aqueous solution (2.00 L*2) and brine (2.00 L), the organic layer is dried over Na₂SO4, filtered and concentrated under vacuum to give Compound 3B (3.88 kg, crude) as yellow oil.

### General Procedure for Preparation of TRIS-PEG2-CBZ.

[chemical structure]

[0484] A solution of Compound 3B (775 g, 487 mmol, 50.3% purity, 1.00 eq) in HCl/dioxane (4 M, 2.91 L, 23.8 eq) is stirred at 25° C., for 2 hrs. LCMS showed the desired MS is given. The mixture is concentrated under vacuum to give a residue. Then the combined residue is diluted with DCM (5.00 L), adjusted to pH=8 with 2.5 M NaOH aqueous solution, and separated. The aqueous phase is extracted with DCM (3.00 L) again, then the aqueous solution is adjusted to pH=3 with 1 N HCl aqueous solution, then extracted with DCM (5.00 L*2), the combined organic layer is washed with brine (3.00 L), dried over Na₂SO4, filtered and concentrated under vacuum. The crude is purified by column chromatography (SiO₂, DCM:MeOH=0:1-12:1, 0.1% HOAc, R_{f}=0.4). The residue is diluted with DCM (5.00 L), adjusted to pH=8 with 2.5 M NaOH aqueous solution, separated, the aqueous solution is extracted with DCM (3.00 L) again, then the aqueous solution is adjusted to pH=3 with 6 N HCl aqueous solution, extracted with DCM:MeOH=10:1 (5.00 L*2), the combined organic layer is washed with brine (2.00 L), dried over Na₂SO4, filtered and concentrated under vacuum to give a residue. Then the residue is diluted with MeCN (5.00 L), concentrated under vacuum, repeat this procedure twice to remove water to give TRIS-PEG2-CBZ (1.25 kg, 1.91 mol, 78.1% yield, 95.8% purity) as light yellow oil. ¹HNMR: 400 MHZ, MeOD, δ 7.30-7.35 (5H), 5.07 (s, 2H), 3.65-3.70 (m, 16H), 3.59 (s, 4H), 3.45 (t, J=5.6 Hz), 2.51 (t, J=6.0 Hz), 2.43 (t, 6.4 Hz).

### Scheme for the Preparation of TriNGal-TRIS-Peg2-Phosph 8c

[chemical structure]

[chemical structure]

[chemical structure]

[chemical structure]

### TriGNal-TRIS-Peg2-Phosph 8c

### General Procedure for Preparation of Compound 3C

[chemical structure]

[0487] To a solution of Compound 1C (155 g, 245 mmol, 1.00 eq) in ACN (1500 mL) is added TBTU (260 g, 811 mmol, 3.30 eq), DIEA (209 g, 1.62 mol, 282 mL, 6.60 eq) and Compound 2C (492 g, 811 mmol, 3.30 eq, TsOH) at 0° C., the mixture is stirred at 15° C., for 16 hrs. LCMS showed the desired MS is given. The mixture is concentrated under vacuum to give a residue, then the mixture is diluted with DCM (2000 mL), washed with 1 N HCl aqueous solution (700 mL*2), then saturated NaHCO₃ aqueous solution (700 mL*2) and concentrated under vacuum. The crude is purified by column chromatography to give Compound 3C (304 g, 155 mmol, 63.1% yield, 96.0% purity) as a yellow solid.

### General Procedure for Preparation of Compound 4C

[chemical structure]

[0489] Two batches solution of Compound 3C (55.0 g, 29.2 mmol, 1.00 eq) in MeOH (1600 mL) is added Pd/C (6.60 g, 19.1 mmol, 10.0% purity) and TFA (3.34 g, 29.2 mmol, 2.17 mL, 1.00 eq), the mixture is degassed under vacuum and purged with H₂. The mixture is stirred under H₂ (15 psi) at 15° C., for 2 hours. LCMS showed the desired MS is given. The mixture is filtered and the filtrate is concentrated under vacuum to give Compound 4C (106 g, 54.8 mmol, 93.7% yield, 96.2% purity, TFA) as a white solid.

### General Procedure for Preparation of Compound 5C

[chemical structure]

[0491] Two batches in parallel. To a solution of EDCI (28.8 g, 150 mmol, 1.00 eq) in DCM (125 mL) is added compound 4a (25.0 g, 150 mmol, 1.00 eq) dropwise at 0° C., then the mixture is added to compound 4 (25.0 g, 150 mmol, 1.00 eq) in DCM (125 mL) at 0° C., then the mixture is stirred at 25° C., for 1 hr. TLC (Petroleum ether:Ethyl acetate=3:1, R_{f}=0.45) showed the reactant is consumed and one new spot is formed. The reaction mixture is diluted with DCM (100 mL) then washed with aq. NaHCO₃ (250 mL*1) and brine (250 mL), dried over Na₂SO4, filtered and concentrated under reduced pressure to give a residue. The residue is purified by column chromatography (SiO₂, Petroleum ether:Ethyl acetate=100:1 to 3:1), TLC (SiO₂, Petroleum ether:Ethyl acetate=3:1), R_{f}=0.45, then concentrated under reduced pressure to give a residue. Compound 5C (57.0 g, 176 mmol, 58.4% yield, 96.9% purity) is obtained as colorless oil and confirmed ¹HNMR: EW33072-2-P1A, 400 MHZ, DMSO δ 9.21 (s, 1H), 7.07-7.09 (m, 2H), 6.67-6.70 (m, 2H), 3.02-3.04 (m, 2H), 2.86-2.90 (m, 2H)

### General Procedure for Preparation of Compound 6

[chemical structure]

[0493] To a mixture of compound 3 (79.0 g, 41.0 mmol, 96.4% purity, 1.00 eq, TFA) and compound 6C (14.2 g, 43.8 mmol, 96.9% purity, 1.07 eq) in DCM (800 mL) is added TEA (16.6 g, 164 mmol, 22.8 mL, 4.00 eq) dropwise at 0° C., the mixture is stirred at 15° C., for 16 hrs. LCMS (EW33072-12-P1B, Rt=0.844 min) showed the desired mass is detected. The reaction mixture is diluted with DCM (400 mL) and washed with aq. NaHCO₃ (400 mL*1) and brine(400 mL*1), then the mixture is diluted with DCM (2.00 L) and washed with 0.7 M Na₂CO₃ (1000 mL*3) and brine(800 mL*3), dried over Na₂SO4, filtered and concentrated under reduced pressure to give a residue. The residue is used to next step directly without purification. Compound 6 (80.0 g, crude) is obtained as white solid and confirmed via ¹HNMR: EW33072-12-P1A, 400 MHz, MeOD & 7.02-7.04 (m, 2H), 6.68-6.70 (m, 2H), 5.34-5.35 (s, 3H), 5.07-5.08 (d, J=4.00 Hz, 3H), 4.62-4.64 (d, J=8.00 Hz, 3H), 3.71-4.16 (m, 16H), 3.31-3.70 (m, 44H), 2.80-2.83 (m, 2H), 2.68 (m, 2H), 2.46-2.47 (m, 10H), 2.14 (s, 9H), 2.03 (s, 9H), 1.94-1.95 (d, J=4.00 Hz, 18H).

### General Procedure for Preparation of TriGNal-TRIS-Peg2-Phosph 8c

[chemical structure]

[0495] Two batches are synthesized in parallel. To a solution of compound 6C (40.0 g, 21.1 mmol, 1.00 eq in DCM (600 mL) is added diisopropylammonium tetrazolide (3.62 g, 21.1 mmol, 1.00 eq) and compound 7c (6.37 g, 21.1 mmol, 6.71 mL, 1.00 eq) in DCM (8.00 mL) drop-wise, the mixture is stirred at 30° C., for 1 hr, then added compound 7c (3.18 g, 10.6 mmol, 3.35 mL, 0.50 eq) in DCM (8.00 mL) drop-wise, the mixture is stirred at 30° C., for 30 mins, then added compound 7c (3.18 g, 10.6 mmol, 3.35 mL, 0.50 eq) in DCM (8.00 mL) drop-wise, the mixture is stirred at 30° C., for 1.5 hrs. LCMS (EW33072-17-P1C1, Rt=0.921 min) showed the desired MS+1 is detected. LCMS (EW33072-17-P1C₂, Rt=0.919 min) showed the desired MS+1 is detected. Two batches are combined for work-up. The mixture is diluted with DCM (1.20 L), washed with saturated NaHCO₃ aqueous solution (1.60 L*2), 3% DMF in H₂O (1.60 L*2), H₂O (1.60 L*3), brine (1.60 L), dried over Na₂SO4, filtered and concentrated under reduced pressure to give a residue. The residue is purified by column chromatography (SiO₂, DCM:MeOH:TEA=100:3:2) TLC (SiO₂, DCM:MeOH=10:1, R_{f}=0.45), then concentrated under reduced pressure to give a residue. Compound 8C (76.0 g, 34.8 mmol, 82.5% yield, 96.0% purity) is obtained as white solid and confirmed via ¹HNMR: EW33072-19-PIC, 400 MHZ, MeOD δ 7.13-7.15 (d. J=8.50 Hz, 2H), 6.95-6.97 (dd, J=8.38, 1.13 Hz, 2H), 5.34 (d, J=2.88 Hz, 3H), 0.09 (dd, J=11.26, 3.38 Hz, 3H), 4.64 (d, J=8.50 Hz, 3H), 3.99-4.20 (m, 12H), 3.88-3.98 (m, 5H), 3.66-3.83 (m, 20H), 3.51-3.65 (m, 17H), 3.33-3.50 (m, 9H), 2.87 (t, J=7.63 Hz, 2H), 2.76 (t. J=5.94 Hz, 2H), 2.42-2.50 (m, 10H), 2.14 (s, 9H), 2.03 (s, 9H), 1.94-1.95 (d, J=6.13 Hz, 18H), 1.24-1.26 (d. J=6.75 Hz, 6H), 1.18-1.20 (d, J=6.75 Hz, 6H)

### Example 16: Delivery to Central Nervous System Injection

[0496] siRNA's with modifications and hydrophobic conjugates as described are injected intracerebroventricularly or intrathecally according to published procedures (Alterman, J. F., Godinho, B. M. D. C., Hassler, M. R. et al. A divalent siRNA chemical scaffold for potent and sustained modulation of gene expression throughout the central nervous system. Nat Biotechnol 37, 884-894 (2019). https://doi.org/10.1038/s41587-019-0205-0, Njoo, C., Heinl, C., Kuner, R. In Vivo SiRNA Transfection and Gene Knockdown in Spinal Cord via Rapid Noninvasive Lumbar Intrathecal Injections in Mice. J. Vis. Exp. (85), e51229, doi: 10.3791/51229 (2014)), 14 days post injection, mice are euthanized, brain hemispheres are harvested, frozen, later homogenized, and tested for PLIN1 mRNA and protein expression.

### Example 17: Bullet Point Description of a Modified siRNA

[0497] An example PLIN1-targeting siRNA is as follows:
[0498] 21 mer:
   [0499] a. 19 base pairs
   [0500] b. 2 nt overhangs
[0501] antisense strand:
   [0502] a. vinyl phosphonate (VP) at 5′ end
   [0503] b. 2 phosphorothioate bonds (PS) at each end
[0504] sense strand:
   [0505] a. hydrophobic group (C16-C18) at 5′ end
   [0506] b. optional 0-2 PS at 5′ end
   [0507] c. 2 PS at 3′ end
[0508] modification pattern of 2′ fluoro and 2′ methyl groups.

### Example 18: Modification Motif 1

[0509] An example PLIN1-targeting siRNA includes a combination of the following modifications:
[0510] Position 9 (from 5′ to 3′) of the sense strand is 2′ F.
[0511] If position 9 is a pyrimidine then all purines in the Sense Strand are 2′OMe, and 1-5 pyrimidines between positions 5 and 11 are 2′ F provided that there are never three 2′F modifications in a row.
[0512] If position 9 is a purine then all pyrimidines in the Sense Strand are 2′OMe, and 1-5 purines between positions 5 and 11 are 2′ F provided that there are never three 2′F modifications in a row.
[0513] Antisense strand odd-numbered positions are 2′OMe and even-numbered positions are a mixture of 2′ F, 2′OMe and 2′ deoxy.

### Example 19: Modification Motif 2

[0514] An example PLIN1-targeting siRNA includes a combination of the following modifications:
[0515] Position 9 (from 5′ to 3′) of the sense strand is 2′ deoxy.
[0516] Sense strand positions 5, 7 and 8 are 2′ F.
[0517] All pyrimidines in positions 10-21 are 2′ OMe, and purines are a mixture of 2′ OMe and 2′ F. Alternatively, all purines in positions 10-21 are 2′ OMe and all pyrimidines in positions 10-21 are a mixture of 2′ OMe and 2′ F.
[0518] Antisense strand odd-numbered positions are 2′OMe and even-numbered positions are a mixture of 2′ F, 2′OMe and 2′ deoxy.

### Example 20: Example siRNA Sequences

[0519] The base sequences of some example siRNAs are shown in Table 22.

TABLE 22
Base sequences of example siRNAs

| | Sense | Sense Strand | Antisense | Antisense Strand |
|---|---|---|---|---|
| siRNA | SEQ ID | Base Sequence | SEQ ID | Base Sequence |
| Name | NO: | (5′ to 3′) | NO: | (5′ to 3′) |
| ETD01510 | 5970 | CAACACUCUUUCUCGACAAUU | 5990 | UUGUCGAGAAAGAGUGUUGUU |
| ETD01540 | 5971 | CAACACUCUUUCUCGACAAUU | 5991 | UUGUCGAGAAAGAGUGUUGUU |
| ETD01624 | 5971 | CAACACUCUUUCUCGACAAUU | 5992 | 5VPUUGUCGAGAAAGAGUGUUGUU |
| ETD01751 | 5971 | CAACACUCUUUCUCGACAAUU | 5993 | 5VPUUGUCGAGAAAGAGUGUUGUU |
| ETD01754 | 5972 | UAAGAGUAAUUGCCUAACAUU | 5994 | UGUUAGGCAAUUACUCUUAUU |
| ETD01755 | 5973 | GUAAUUGCCUAACUUGAUAUU | 5995 | UAUCAAGUUAGGCAAUUACUU |
| ETD01756 | 5974 | UUUGACACAUUCUUAGCAAUU | 5996 | UUGCUAAGAAUGUGUCAAAUU |
| ETD01899 | 5975 | CAGUUUUUAAGGGACACCAUU | 5997 | UGGUGUCCCUUAAAAACUGUU |
| ETD01900 | 5976 | UUUUUAAGGGACACCAGAAUU | 5998 | UUCUGGUGUCCCUUAAAAAUU |
| ETD01901 | 5977 | UUUUGACACAUUCUUAGCAUU | 5999 | UGCUAAGAAUGUGUCAAAAUU |
| ETD01902 | 5978 | UUGACACAUUCUUAGCACAUU | 6000 | UGUGCUAAGAAUGUGUCAAUU |
| ETD01903 | 5979 | ACAUUCUUAGCACUGAACAUU | 6001 | UGUUCAGUGCUAAGAAUGUUU |
| ETD01904 | 5980 | UGCAUAGUCACUCUUUUGAUU | 6002 | UCAAAAGAGUGACUAUGCAUU |
| ETD01905 | 5981 | AACUACUGCAUAAUAUGGAUU | 6003 | UCCAUAUUAUGCAGUAGUUUU |
| ETD01510 | 5982 | CAACACUCUUUCUCGACAA | 6004 | UUGUCGAGAAAGAGUGUUG |
| ETD01540 | 5983 | CAACACUCUUUCUCGACAA | 6005 | UUGUCGAGAAAGAGUGUUG |
| ETD01624 | 5983 | CAACACUCUUUCUCGACAA | 6006 | 5VPUUGUCGAGAAAGAGUGUUG |
| ETD01751 | 5983 | CAACACUCUUUCUCGACAA | 6007 | 5VPUUGUCGAGAAAGAGUGUUG |
| ETD01754 | 5984 | UAAGAGUAAUUGCCUAACA | 6008 | UGUUAGGCAAUUACUCUUA |
| ETD01755 | 5985 | GUAAUUGCCUAACUUGAUA | 6009 | UAUCAAGUUAGGCAAUUAC |
| ETD01756 | 5986 | UUUGACACAUUCUUAGCAA | 6010 | UUGCUAAGAAUGUGUCAAA |
| ETD01899 | 1908 | CAGUUUUUAAGGGACACCA | 4806 | UGGUGUCCCUUAAAAACUG |
| ETD01900 | 5987 | UUUUUAAGGGACACCAGAA | 6011 | UUCUGGUGUCCCUUAAAAA |
| ETD01901 | 2124 | UUUUGACACAUUCUUAGCA | 5022 | UGCUAAGAAUGUGUCAAAA |
| ETD01902 | 5988 | UUGACACAUUCUUAGCACA | 6012 | UGUGCUAAGAAUGUGUCAA |
| ETD01903 | 5989 | ACAUUCUUAGCACUGAACA | 6013 | UGUUCAGUGCUAAGAAUGU |
| ETD01904 | 2390 | UGCAUAGUCACUCUUUUGA | 5288 | UCAAAAGAGUGACUAUGCA |
| ETD01905 | 2787 | AACUACUGCAUAAUAUGGA | 5685 | UCCAUAUUAUGCAGUAGUU |

[0520] While preferred embodiments of the present invention have been shown and described herein, it will be obvious to those skilled in the art that such embodiments are provided by way of example only. Numerous variations, changes, and substitutions will now occur to those skilled in the art without departing from the invention. It should be understood that various alternatives to the embodiments of the invention described herein may be employed in practicing the invention. It is intended that the following claims define the scope of the invention and that methods and compositions within the scope of these claims and their equivalents be covered thereby.

### IV. Sequence Information

[0521] Some embodiments include one or more nucleic acid sequences in the following tables:

Sequence Information

| SEQ ID NO: | Description |
|---|---|
| 1-2898 | PLIN1 siRNA sense strand sequences |
| 2899-5796 | PLIN1 siRNA antisense strand sequences |
| 5797-5845 | Modified PLIN1 siRNA sense strand sequences |
| 5846-5894 | Modified PLIN1 siRNA antisense strand sequences |
| 5895-5943 | Alternatively modified PLIN1 siRNA sense strand |
| | sequences |
| 5944-5959 | Examples of modified PLIN1 siRNA sense strand |
| | sequences |
| 5960-5969 | Examples of modified PLIN1 siRNA antisense strand |
| | sequences |
| 5970-5989 | Examples of PLIN1 siRNA sense strand base sequences |
| 5990-6013 | Examples of PLIN1 siRNA antisense strand base |
| | sequences |
| 6014 | Full-length human PLIN1 mRNA sequence (Ensembl Acc. |
| | No. ENST00000300055.10) (human RNA) |
| 6015-6064 | Modification pattern 1S to 50S |
| 6065-6074 | Modification pattern 1AS to 10AS |
| 6075 | Modification pattern ASO1 |

Sequences

| | SEQ | | SEQ | |
|---|---|---|---|---|
| | ID | Sense strand | ID | Antisense strand |
| siRNA Name | NO: | sequence (5′-3′) | NO: | sequence (5′-3′) |
| siRNA 1 | 1 | ACUCUGCAGCCUGGGCUCU | 2899 | AGAGCCCAGGCUGCAGAGU |
| siRNA 2 | 2 | CUCUGCAGCCUGGGCUCUG | 2900 | CAGAGCCCAGGCUGCAGAG |
| siRNA 3 | 3 | UCUGCAGCCUGGGCUCUGU | 2901 | ACAGAGCCCAGGCUGCAGA |
| siRNA 4 | 4 | CUGCAGCCUGGGCUCUGUG | 2902 | CACAGAGCCCAGGCUGCAG |
| siRNA 5 | 5 | UGCAGCCUGGGCUCUGUGA | 2903 | UCACAGAGCCCAGGCUGCA |
| siRNA 6 | 6 | GCAGCCUGGGCUCUGUGAG | 2904 | CUCACAGAGCCCAGGCUGC |
| siRNA 7 | 7 | CAGCCUGGGCUCUGUGAGA | 2905 | UCUCACAGAGCCCAGGCUG |
| siRNA 8 | 8 | AGCCUGGGCUCUGUGAGAC | 2906 | GUCUCACAGAGCCCAGGCU |
| siRNA 9 | 9 | GCCUGGGCUCUGUGAGACU | 2907 | AGUCUCACAGAGCCCAGGC |
| siRNA 10 | 10 | CCUGGGCUCUGUGAGACUG | 2908 | CAGUCUCACAGAGCCCAGG |
| siRNA 11 | 11 | CUGGGCUCUGUGAGACUGA | 2909 | UCAGUCUCACAGAGCCCAG |
| siRNA 12 | 12 | UGGGCUCUGUGAGACUGAG | 2910 | CUCAGUCUCACAGAGCCCA |
| siRNA 13 | 13 | GGGCUCUGUGAGACUGAGG | 2911 | CCUCAGUCUCACAGAGCCC |
| siRNA 14 | 14 | GGCUCUGUGAGACUGAGGU | 2912 | ACCUCAGUCUCACAGAGCC |
| siRNA 15 | 15 | GCUCUGUGAGACUGAGGUG | 2913 | CACCUCAGUCUCACAGAGC |
| siRNA 16 | 16 | CUCUGUGAGACUGAGGUGG | 2914 | CCACCUCAGUCUCACAGAG |
| siRNA 17 | 17 | UCUGUGAGACUGAGGUGGC | 2915 | GCCACCUCAGUCUCACAGA |
| siRNA 18 | 18 | CUGUGAGACUGAGGUGGCG | 2916 | CGCCACCUCAGUCUCACAG |
| siRNA 19 | 19 | UGUGAGACUGAGGUGGCGG | 2917 | CCGCCACCUCAGUCUCACA |
| siRNA 20 | 20 | GUGAGACUGAGGUGGCGGU | 2918 | ACCGCCACCUCAGUCUCAC |
| siRNA 21 | 21 | UGAGACUGAGGUGGCGGUC | 2919 | GACCGCCACCUCAGUCUCA |
| siRNA 22 | 22 | GAGACUGAGGUGGCGGUCA | 2920 | UGACCGCCACCUCAGUCUC |
| siRNA 23 | 23 | AGACUGAGGUGGCGGUCAG | 2921 | CUGACCGCCACCUCAGUCU |
| siRNA 24 | 24 | GACUGAGGUGGCGGUCAGC | 2922 | GCUGACCGCCACCUCAGUC |
| siRNA 25 | 25 | ACUGAGGUGGCGGUCAGCC | 2923 | GGCUGACCGCCACCUCAGU |
| siRNA 26 | 26 | CUGAGGUGGCGGUCAGCCG | 2924 | CGGCUGACCGCCACCUCAG |
| siRNA 27 | 27 | UGAGGUGGCGGUCAGCCGG | 2925 | CCGGCUGACCGCCACCUCA |
| siRNA 28 | 28 | GAGGUGGCGGUCAGCCGGA | 2926 | UCCGGCUGACCGCCACCUC |
| siRNA 29 | 29 | AGGUGGCGGUCAGCCGGAG | 2927 | CUCCGGCUGACCGCCACCU |
| siRNA 30 | 30 | GGUGGCGGUCAGCCGGAGU | 2928 | ACUCCGGCUGACCGCCACC |
| siRNA 31 | 31 | GUGGCGGUCAGCCGGAGUG | 2929 | CACUCCGGCUGACCGCCAC |
| siRNA 32 | 32 | UGGCGGUCAGCCGGAGUGA | 2930 | UCACUCCGGCUGACCGCCA |
| siRNA 33 | 33 | GGCGGUCAGCCGGAGUGAG | 2931 | CUCACUCCGGCUGACCGCC |
| siRNA 34 | 34 | GCGGUCAGCCGGAGUGAGU | 2932 | ACUCACUCCGGCUGACCGC |
| siRNA 35 | 35 | CGGUCAGCCGGAGUGAGUG | 2933 | CACUCACUCCGGCUGACCG |
| siRNA 36 | 36 | GGUCAGCCGGAGUGAGUGU | 2934 | ACACUCACUCCGGCUGACC |
| siRNA 37 | 37 | GUCAGCCGGAGUGAGUGUU | 2935 | AACACUCACUCCGGCUGAC |
| siRNA 38 | 38 | UCAGCCGGAGUGAGUGUUG | 2936 | CAACACUCACUCCGGCUGA |
| siRNA 39 | 39 | CAGCCGGAGUGAGUGUUGG | 2937 | CCAACACUCACUCCGGCUG |
| siRNA 40 | 40 | AGCCGGAGUGAGUGUUGGG | 2938 | CCCAACACUCACUCCGGCU |
| siRNA 41 | 41 | GCCGGAGUGAGUGUUGGGG | 2939 | CCCCAACACUCACUCCGGC |
| siRNA 42 | 42 | CCGGAGUGAGUGUUGGGGU | 2940 | ACCCCAACACUCACUCCGG |
| siRNA 43 | 43 | CGGAGUGAGUGUUGGGGUC | 2941 | GACCCCAACACUCACUCCG |
| siRNA 44 | 44 | GGAGUGAGUGUUGGGGUCC | 2942 | GGACCCCAACACUCACUCC |
| siRNA 45 | 45 | GAGUGAGUGUUGGGGUCCU | 2943 | AGGACCCCAACACUCACUC |
| siRNA 46 | 46 | AGUGAGUGUUGGGGUCCUG | 2944 | CAGGACCCCAACACUCACU |
| siRNA 47 | 47 | GUGAGUGUUGGGGUCCUGG | 2945 | CCAGGACCCCAACACUCAC |
| siRNA 48 | 48 | UGAGUGUUGGGGUCCUGGG | 2946 | CCCAGGACCCCAACACUCA |
| siRNA 49 | 49 | GAGUGUUGGGGUCCUGGGG | 2947 | CCCCAGGACCCCAACACUC |
| SIRNA 50 | 50 | AGUGUUGGGGUCCUGGGGC | 2948 | GCCCCAGGACCCCAACACU |
| siRNA 51 | 51 | GUGUUGGGGUCCUGGGGCA | 2949 | UGCCCCAGGACCCCAACAC |
| siRNA 52 | 52 | UGUUGGGGUCCUGGGGCAC | 2950 | GUGCCCCAGGACCCCAACA |
| siRNA 53 | 53 | GUUGGGGUCCUGGGGCACC | 2951 | GGUGCCCCAGGACCCCAAC |
| siRNA 54 | 54 | UUGGGGUCCUGGGGCACCU | 2952 | AGGUGCCCCAGGACCCCAA |
| siRNA 55 | 55 | UGGGGUCCUGGGGCACCUG | 2953 | CAGGUGCCCCAGGACCCCA |
| siRNA 56 | 56 | GGGGUCCUGGGGCACCUGC | 2954 | GCAGGUGCCCCAGGACCCC |
| siRNA 57 | 57 | GGGUCCUGGGGCACCUGCC | 2955 | GGCAGGUGCCCCAGGACCC |
| siRNA 58 | 58 | GGUCCUGGGGCACCUGCCU | 2956 | AGGCAGGUGCCCCAGGACC |
| siRNA 59 | 59 | GUCCUGGGGCACCUGCCUU | 2957 | AAGGCAGGUGCCCCAGGAC |
| siRNA 60 | 60 | UCCUGGGGCACCUGCCUUA | 2958 | UAAGGCAGGUGCCCCAGGA |
| SIRNA 61 | 61 | CCUGGGGCACCUGCCUUAC | 2959 | GUAAGGCAGGUGCCCCAGG |
| siRNA 62 | 62 | CUGGGGCACCUGCCUUACA | 2960 | UGUAAGGCAGGUGCCCCAG |
| siRNA 63 | 63 | UGGGGCACCUGCCUUACAU | 2961 | AUGUAAGGCAGGUGCCCCA |
| siRNA 64 | 64 | GGGGCACCUGCCUUACAUG | 2962 | CAUGUAAGGCAGGUGCCCC |
| siRNA 65 | 65 | GGGCACCUGCCUUACAUGG | 2963 | CCAUGUAAGGCAGGUGCCC |
| siRNA 66 | 66 | GGCACCUGCCUUACAUGGC | 2964 | GCCAUGUAAGGCAGGUGCC |
| siRNA 67 | 67 | GCACCUGCCUUACAUGGCU | 2965 | AGCCAUGUAAGGCAGGUGC |
| siRNA 68 | 68 | CACCUGCCUUACAUGGCUU | 2966 | AAGCCAUGUAAGGCAGGUG |
| siRNA 69 | 69 | ACCUGCCUUACAUGGCUUG | 2967 | CAAGCCAUGUAAGGCAGGU |
| siRNA 70 | 70 | CCUGCCUUACAUGGCUUGU | 2968 | ACAAGCCAUGUAAGGCAGG |
| siRNA 71 | 71 | CUGCCUUACAUGGCUUGUU | 2969 | AACAAGCCAUGUAAGGCAG |
| siRNA 72 | 72 | UGCCUUACAUGGCUUGUUU | 2970 | AAACAAGCCAUGUAAGGCA |
| siRNA 73 | 73 | GCCUUACAUGGCUUGUUUA | 2971 | UAAACAAGCCAUGUAAGGC |
| siRNA 74 | 74 | CCUUACAUGGCUUGUUUAU | 2972 | AUAAACAAGCCAUGUAAGG |
| siRNA 75 | 75 | CUUACAUGGCUUGUUUAUG | 2973 | CAUAAACAAGCCAUGUAAG |
| siRNA 76 | 76 | UUACAUGGCUUGUUUAUGA | 2974 | UCAUAAACAAGCCAUGUAA |
| siRNA 77 | 77 | UACAUGGCUUGUUUAUGAA | 2975 | UUCAUAAACAAGCCAUGUA |
| siRNA 78 | 78 | ACAUGGCUUGUUUAUGAAC | 2976 | GUUCAUAAACAAGCCAUGU |
| siRNA 79 | 79 | CAUGGCUUGUUUAUGAACA | 2977 | UGUUCAUAAACAAGCCAUG |
| siRNA 80 | 80 | AUGGCUUGUUUAUGAACAU | 2978 | AUGUUCAUAAACAAGCCAU |
| siRNA 81 | 81 | UGGCUUGUUUAUGAACAUU | 2979 | AAUGUUCAUAAACAAGCCA |
| siRNA 82 | 82 | GGCUUGUUUAUGAACAUUA | 2980 | UAAUGUUCAUAAACAAGCC |
| siRNA 83 | 83 | GCUUGUUUAUGAACAUUAA | 2981 | UUAAUGUUCAUAAACAAGC |
| siRNA 84 | 84 | CUUGUUUAUGAACAUUAAA | 2982 | UUUAAUGUUCAUAAACAAG |
| siRNA 85 | 85 | UUGUUUAUGAACAUUAAAG | 2983 | CUUUAAUGUUCAUAAACAA |
| siRNA 86 | 86 | UGUUUAUGAACAUUAAAGG | 2984 | CCUUUAAUGUUCAUAAACA |
| siRNA 87 | 87 | GUUUAUGAACAUUAAAGGG | 2985 | CCCUUUAAUGUUCAUAAAC |
| siRNA 88 | 88 | UUUAUGAACAUUAAAGGGA | 2986 | UCCCUUUAAUGUUCAUAAA |
| siRNA 89 | 89 | UUAUGAACAUUAAAGGGAA | 2987 | UUCCCUUUAAUGUUCAUAA |
| siRNA 90 | 90 | UAUGAACAUUAAAGGGAAG | 2988 | CUUCCCUUUAAUGUUCAUA |
| siRNA 91 | 91 | AUGAACAUUAAAGGGAAGA | 2989 | UCUUCCCUUUAAUGUUCAU |
| siRNA 92 | 92 | UGAACAUUAAAGGGAAGAA | 2990 | UUCUUCCCUUUAAUGUUCA |
| siRNA 93 | 93 | GAACAUUAAAGGGAAGAAG | 2991 | CUUCUUCCCUUUAAUGUUC |
| siRNA 94 | 94 | AACAUUAAAGGGAAGAAGU | 2992 | ACUUCUUCCCUUUAAUGUU |
| siRNA 95 | 95 | ACAUUAAAGGGAAGAAGUU | 2993 | AACUUCUUCCCUUUAAUGU |
| siRNA 96 | 96 | CAUUAAAGGGAAGAAGUUG | 2994 | CAACUUCUUCCCUUUAAUG |
| siRNA 97 | 97 | AUUAAAGGGAAGAAGUUGA | 2995 | UCAACUUCUUCCCUUUAAU |
| siRNA 98 | 98 | UUAAAGGGAAGAAGUUGAA | 2996 | UUCAACUUCUUCCCUUUAA |
| siRNA 99 | 99 | UAAAGGGAAGAAGUUGAAG | 2997 | CUUCAACUUCUUCCCUUUA |
| siRNA 100 | 100 | AAAGGGAAGAAGUUGAAGC | 2998 | GCUUCAACUUCUUCCCUUU |
| siRNA 101 | 101 | AAGGGAAGAAGUUGAAGCU | 2999 | AGCUUCAACUUCUUCCCUU |
| siRNA 102 | 102 | AGGGAAGAAGUUGAAGCUU | 3000 | AAGCUUCAACUUCUUCCCU |
| siRNA 103 | 103 | GGGAAGAAGUUGAAGCUUG | 3001 | CAAGCUUCAACUUCUUCCC |
| siRNA 104 | 104 | GGAAGAAGUUGAAGCUUGA | 3002 | UCAAGCUUCAACUUCUUCC |
| siRNA 105 | 105 | GAAGAAGUUGAAGCUUGAG | 3003 | CUCAAGCUUCAACUUCUUC |
| siRNA 106 | 106 | AAGAAGUUGAAGCUUGAGG | 3004 | CCUCAAGCUUCAACUUCUU |
| siRNA 107 | 107 | AGAAGUUGAAGCUUGAGGA | 3005 | UCCUCAAGCUUCAACUUCU |
| siRNA 108 | 108 | GAAGUUGAAGCUUGAGGAG | 3006 | CUCCUCAAGCUUCAACUUC |
| siRNA 109 | 109 | AAGUUGAAGCUUGAGGAGC | 3007 | GCUCCUCAAGCUUCAACUU |
| siRNA 110 | 110 | AGUUGAAGCUUGAGGAGCG | 3008 | CGCUCCUCAAGCUUCAACU |
| siRNA 111 | 111 | GUUGAAGCUUGAGGAGCGA | 3009 | UCGCUCCUCAAGCUUCAAC |
| siRNA 112 | 112 | UUGAAGCUUGAGGAGCGAG | 3010 | CUCGCUCCUCAAGCUUCAA |
| siRNA 113 | 113 | UGAAGCUUGAGGAGCGAGG | 3011 | CCUCGCUCCUCAAGCUUCA |
| siRNA 114 | 114 | GAAGCUUGAGGAGCGAGGA | 3012 | UCCUCGCUCCUCAAGCUUC |
| siRNA 115 | 115 | AAGCUUGAGGAGCGAGGAU | 3013 | AUCCUCGCUCCUCAAGCUU |
| siRNA 116 | 116 | AGCUUGAGGAGCGAGGAUG | 3014 | CAUCCUCGCUCCUCAAGCU |
| siRNA 117 | 117 | GCUUGAGGAGCGAGGAUGG | 3015 | CCAUCCUCGCUCCUCAAGC |
| siRNA 118 | 118 | CUUGAGGAGCGAGGAUGGC | 3016 | GCCAUCCUCGCUCCUCAAG |
| siRNA 119 | 119 | UUGAGGAGCGAGGAUGGCA | 3017 | UGCCAUCCUCGCUCCUCAA |
| siRNA 120 | 120 | UGAGGAGCGAGGAUGGCAG | 3018 | CUGCCAUCCUCGCUCCUCA |
| siRNA 121 | 121 | GAGGAGCGAGGAUGGCAGU | 3019 | ACUGCCAUCCUCGCUCCUC |
| siRNA 122 | 122 | AGGAGCGAGGAUGGCAGUC | 3020 | GACUGCCAUCCUCGCUCCU |
| siRNA 123 | 123 | GGAGCGAGGAUGGCAGUCA | 3021 | UGACUGCCAUCCUCGCUCC |
| siRNA 124 | 124 | GAGCGAGGAUGGCAGUCAA | 3022 | UUGACUGCCAUCCUCGCUC |
| siRNA 125 | 125 | AGCGAGGAUGGCAGUCAAC | 3023 | GUUGACUGCCAUCCUCGCU |
| siRNA 126 | 126 | GCGAGGAUGGCAGUCAACA | 3024 | UGUUGACUGCCAUCCUCGC |
| siRNA 127 | 127 | CGAGGAUGGCAGUCAACAA | 3025 | UUGUUGACUGCCAUCCUCG |
| siRNA 128 | 128 | GAGGAUGGCAGUCAACAAA | 3026 | UUUGUUGACUGCCAUCCUC |
| siRNA 129 | 129 | AGGAUGGCAGUCAACAAAG | 3027 | CUUUGUUGACUGCCAUCCU |
| siRNA 130 | 130 | GGAUGGCAGUCAACAAAGG | 3028 | CCUUUGUUGACUGCCAUCC |
| siRNA 131 | 131 | GAUGGCAGUCAACAAAGGC | 3029 | GCCUUUGUUGACUGCCAUC |
| siRNA 132 | 132 | AUGGCAGUCAACAAAGGCC | 3030 | GGCCUUUGUUGACUGCCAU |
| siRNA 133 | 133 | UGGCAGUCAACAAAGGCCU | 3031 | AGGCCUUUGUUGACUGCCA |
| siRNA 134 | 134 | GGCAGUCAACAAAGGCCUC | 3032 | GAGGCCUUUGUUGACUGCC |
| siRNA 135 | 135 | GCAGUCAACAAAGGCCUCA | 3033 | UGAGGCCUUUGUUGACUGC |
| siRNA 136 | 136 | CAGUCAACAAAGGCCUCAC | 3034 | GUGAGGCCUUUGUUGACUG |
| siRNA 137 | 137 | AGUCAACAAAGGCCUCACC | 3035 | GGUGAGGCCUUUGUUGACU |
| siRNA 138 | 138 | GUCAACAAAGGCCUCACCU | 3036 | AGGUGAGGCCUUUGUUGAC |
| siRNA 139 | 139 | UCAACAAAGGCCUCACCUU | 3037 | AAGGUGAGGCCUUUGUUGA |
| siRNA 140 | 140 | CAACAAAGGCCUCACCUUG | 3038 | CAAGGUGAGGCCUUUGUUG |
| siRNA 141 | 141 | AACAAAGGCCUCACCUUGC | 3039 | GCAAGGUGAGGCCUUUGUU |
| siRNA 142 | 142 | ACAAAGGCCUCACCUUGCU | 3040 | AGCAAGGUGAGGCCUUUGU |
| siRNA 143 | 143 | CAAAGGCCUCACCUUGCUG | 3041 | CAGCAAGGUGAGGCCUUUG |
| siRNA 144 | 144 | AAAGGCCUCACCUUGCUGG | 3042 | CCAGCAAGGUGAGGCCUUU |
| siRNA 145 | 145 | AAGGCCUCACCUUGCUGGA | 3043 | UCCAGCAAGGUGAGGCCUU |
| siRNA 146 | 146 | AGGCCUCACCUUGCUGGAU | 3044 | AUCCAGCAAGGUGAGGCCU |
| siRNA 147 | 147 | GGCCUCACCUUGCUGGAUG | 3045 | CAUCCAGCAAGGUGAGGCC |
| siRNA 148 | 148 | GCCUCACCUUGCUGGAUGG | 3046 | CCAUCCAGCAAGGUGAGGC |
| siRNA 149 | 149 | CCUCACCUUGCUGGAUGGA | 3047 | UCCAUCCAGCAAGGUGAGG |
| siRNA 150 | 150 | CUCACCUUGCUGGAUGGAG | 3048 | CUCCAUCCAGCAAGGUGAG |
| siRNA 151 | 151 | UCACCUUGCUGGAUGGAGA | 3049 | UCUCCAUCCAGCAAGGUGA |
| siRNA 152 | 152 | CACCUUGCUGGAUGGAGAC | 3050 | GUCUCCAUCCAGCAAGGUG |
| siRNA 153 | 153 | ACCUUGCUGGAUGGAGACC | 3051 | GGUCUCCAUCCAGCAAGGU |
| siRNA 154 | 154 | CCUUGCUGGAUGGAGACCU | 3052 | AGGUCUCCAUCCAGCAAGG |
| siRNA 155 | 155 | CUUGCUGGAUGGAGACCUC | 3053 | GAGGUCUCCAUCCAGCAAG |
| siRNA 156 | 156 | UUGCUGGAUGGAGACCUCC | 3054 | GGAGGUCUCCAUCCAGCAA |
| siRNA 157 | 157 | UGCUGGAUGGAGACCUCCC | 3055 | GGGAGGUCUCCAUCCAGCA |
| siRNA 158 | 158 | GCUGGAUGGAGACCUCCCU | 3056 | AGGGAGGUCUCCAUCCAGC |
| siRNA 159 | 159 | CUGGAUGGAGACCUCCCUG | 3057 | CAGGGAGGUCUCCAUCCAG |
| siRNA 160 | 160 | UGGAUGGAGACCUCCCUGA | 3058 | UCAGGGAGGUCUCCAUCCA |
| siRNA 161 | 161 | GGAUGGAGACCUCCCUGAG | 3059 | CUCAGGGAGGUCUCCAUCC |
| siRNA 162 | 162 | GAUGGAGACCUCCCUGAGC | 3060 | GCUCAGGGAGGUCUCCAUC |
| siRNA 163 | 163 | AUGGAGACCUCCCUGAGCA | 3061 | UGCUCAGGGAGGUCUCCAU |
| siRNA 164 | 164 | UGGAGACCUCCCUGAGCAG | 3062 | CUGCUCAGGGAGGUCUCCA |
| siRNA 165 | 165 | GGAGACCUCCCUGAGCAGG | 3063 | CCUGCUCAGGGAGGUCUCC |
| siRNA 166 | 166 | GAGACCUCCCUGAGCAGGA | 3064 | UCCUGCUCAGGGAGGUCUC |
| siRNA 167 | 167 | AGACCUCCCUGAGCAGGAG | 3065 | CUCCUGCUCAGGGAGGUCU |
| siRNA 168 | 168 | GACCUCCCUGAGCAGGAGA | 3066 | UCUCCUGCUCAGGGAGGUC |
| siRNA 169 | 169 | ACCUCCCUGAGCAGGAGAA | 3067 | UUCUCCUGCUCAGGGAGGU |
| siRNA 170 | 170 | CCUCCCUGAGCAGGAGAAU | 3068 | AUUCUCCUGCUCAGGGAGG |
| siRNA 171 | 171 | CUCCCUGAGCAGGAGAAUG | 3069 | CAUUCUCCUGCUCAGGGAG |
| siRNA 172 | 172 | UCCCUGAGCAGGAGAAUGU | 3070 | ACAUUCUCCUGCUCAGGGA |
| siRNA 173 | 173 | CCCUGAGCAGGAGAAUGUG | 3071 | CACAUUCUCCUGCUCAGGG |
| siRNA 174 | 174 | CCUGAGCAGGAGAAUGUGC | 3072 | GCACAUUCUCCUGCUCAGG |
| siRNA 175 | 175 | CUGAGCAGGAGAAUGUGCU | 3073 | AGCACAUUCUCCUGCUCAG |
| siRNA 176 | 176 | UGAGCAGGAGAAUGUGCUG | 3074 | CAGCACAUUCUCCUGCUCA |
| siRNA 177 | 177 | GAGCAGGAGAAUGUGCUGC | 3075 | GCAGCACAUUCUCCUGCUC |
| siRNA 178 | 178 | AGCAGGAGAAUGUGCUGCA | 3076 | UGCAGCACAUUCUCCUGCU |
| siRNA 179 | 179 | GCAGGAGAAUGUGCUGCAG | 3077 | CUGCAGCACAUUCUCCUGC |
| siRNA 180 | 180 | CAGGAGAAUGUGCUGCAGC | 3078 | GCUGCAGCACAUUCUCCUG |
| siRNA 181 | 181 | AGGAGAAUGUGCUGCAGCG | 3079 | CGCUGCAGCACAUUCUCCU |
| siRNA 182 | 182 | GGAGAAUGUGCUGCAGCGG | 3080 | CCGCUGCAGCACAUUCUCC |
| siRNA 183 | 183 | GAGAAUGUGCUGCAGCGGG | 3081 | CCCGCUGCAGCACAUUCUC |
| siRNA 184 | 184 | AGAAUGUGCUGCAGCGGGU | 3082 | ACCCGCUGCAGCACAUUCU |
| siRNA 185 | 185 | GAAUGUGCUGCAGCGGGUC | 3083 | GACCCGCUGCAGCACAUUC |
| siRNA 186 | 186 | AAUGUGCUGCAGCGGGUCC | 3084 | GGACCCGCUGCAGCACAUU |
| siRNA 187 | 187 | AUGUGCUGCAGCGGGUCCU | 3085 | AGGACCCGCUGCAGCACAU |
| siRNA 188 | 188 | UGUGCUGCAGCGGGUCCUG | 3086 | CAGGACCCGCUGCAGCACA |
| siRNA 189 | 189 | GUGCUGCAGCGGGUCCUGC | 3087 | GCAGGACCCGCUGCAGCAC |
| siRNA 190 | 190 | UGCUGCAGCGGGUCCUGCA | 3088 | UGCAGGACCCGCUGCAGCA |
| siRNA 191 | 191 | GCUGCAGCGGGUCCUGCAG | 3089 | CUGCAGGACCCGCUGCAGC |
| siRNA 192 | 192 | CUGCAGCGGGUCCUGCAGC | 3090 | GCUGCAGGACCCGCUGCAG |
| siRNA 193 | 193 | UGCAGCGGGUCCUGCAGCU | 3091 | AGCUGCAGGACCCGCUGCA |
| siRNA 194 | 194 | GCAGCGGGUCCUGCAGCUG | 3092 | CAGCUGCAGGACCCGCUGC |
| siRNA 195 | 195 | CAGCGGGUCCUGCAGCUGC | 3093 | GCAGCUGCAGGACCCGCUG |
| siRNA 196 | 196 | AGCGGGUCCUGCAGCUGCC | 3094 | GGCAGCUGCAGGACCCGCU |
| siRNA 197 | 197 | GCGGGUCCUGCAGCUGCCG | 3095 | CGGCAGCUGCAGGACCCGC |
| siRNA 198 | 198 | CGGGUCCUGCAGCUGCCGG | 3096 | CCGGCAGCUGCAGGACCCG |
| siRNA 199 | 199 | GGGUCCUGCAGCUGCCGGU | 3097 | ACCGGCAGCUGCAGGACCC |
| siRNA 200 | 200 | GGUCCUGCAGCUGCCGGUG | 3098 | CACCGGCAGCUGCAGGACC |
| siRNA 201 | 201 | GUCCUGCAGCUGCCGGUGG | 3099 | CCACCGGCAGCUGCAGGAC |
| siRNA 202 | 202 | UCCUGCAGCUGCCGGUGGU | 3100 | ACCACCGGCAGCUGCAGGA |
| siRNA 203 | 203 | CCUGCAGCUGCCGGUGGUG | 3101 | CACCACCGGCAGCUGCAGG |
| siRNA 204 | 204 | CUGCAGCUGCCGGUGGUGA | 3102 | UCACCACCGGCAGCUGCAG |
| siRNA 205 | 205 | UGCAGCUGCCGGUGGUGAG | 3103 | CUCACCACCGGCAGCUGCA |
| siRNA 206 | 206 | GCAGCUGCCGGUGGUGAGU | 3104 | ACUCACCACCGGCAGCUGC |
| siRNA 207 | 207 | CAGCUGCCGGUGGUGAGUG | 3105 | CACUCACCACCGGCAGCUG |
| siRNA 208 | 208 | AGCUGCCGGUGGUGAGUGG | 3106 | CCACUCACCACCGGCAGCU |
| siRNA 209 | 209 | GCUGCCGGUGGUGAGUGGC | 3107 | GCCACUCACCACCGGCAGC |
| siRNA 210 | 210 | CUGCCGGUGGUGAGUGGCA | 3108 | UGCCACUCACCACCGGCAG |
| siRNA 211 | 211 | UGCCGGUGGUGAGUGGCAC | 3109 | GUGCCACUCACCACCGGCA |
| siRNA 212 | 212 | GCCGGUGGUGAGUGGCACC | 3110 | GGUGCCACUCACCACCGGC |
| siRNA 213 | 213 | CCGGUGGUGAGUGGCACCU | 3111 | AGGUGCCACUCACCACCGG |
| siRNA 214 | 214 | CGGUGGUGAGUGGCACCUG | 3112 | CAGGUGCCACUCACCACCG |
| siRNA 215 | 215 | GGUGGUGAGUGGCACCUGC | 3113 | GCAGGUGCCACUCACCACC |
| siRNA 216 | 216 | GUGGUGAGUGGCACCUGCG | 3114 | CGCAGGUGCCACUCACCAC |
| siRNA 217 | 217 | UGGUGAGUGGCACCUGCGA | 3115 | UCGCAGGUGCCACUCACCA |
| siRNA 218 | 218 | GGUGAGUGGCACCUGCGAA | 3116 | UUCGCAGGUGCCACUCACC |
| siRNA 219 | 219 | GUGAGUGGCACCUGCGAAU | 3117 | AUUCGCAGGUGCCACUCAC |
| siRNA 220 | 220 | UGAGUGGCACCUGCGAAUG | 3118 | CAUUCGCAGGUGCCACUCA |
| siRNA 221 | 221 | GAGUGGCACCUGCGAAUGC | 3119 | GCAUUCGCAGGUGCCACUC |
| siRNA 222 | 222 | AGUGGCACCUGCGAAUGCU | 3120 | AGCAUUCGCAGGUGCCACU |
| siRNA 223 | 223 | GUGGCACCUGCGAAUGCUU | 3121 | AAGCAUUCGCAGGUGCCAC |
| siRNA 224 | 224 | UGGCACCUGCGAAUGCUUC | 3122 | GAAGCAUUCGCAGGUGCCA |
| siRNA 225 | 225 | GGCACCUGCGAAUGCUUCC | 3123 | GGAAGCAUUCGCAGGUGCC |
| siRNA 226 | 226 | GCACCUGCGAAUGCUUCCA | 3124 | UGGAAGCAUUCGCAGGUGC |
| siRNA 227 | 227 | CACCUGCGAAUGCUUCCAG | 3125 | CUGGAAGCAUUCGCAGGUG |
| siRNA 228 | 228 | ACCUGCGAAUGCUUCCAGA | 3126 | UCUGGAAGCAUUCGCAGGU |
| siRNA 229 | 229 | CCUGCGAAUGCUUCCAGAA | 3127 | UUCUGGAAGCAUUCGCAGG |
| siRNA 230 | 230 | CUGCGAAUGCUUCCAGAAG | 3128 | CUUCUGGAAGCAUUCGCAG |
| siRNA 231 | 231 | UGCGAAUGCUUCCAGAAGA | 3129 | UCUUCUGGAAGCAUUCGCA |
| siRNA 232 | 232 | GCGAAUGCUUCCAGAAGAC | 3130 | GUCUUCUGGAAGCAUUCGC |
| siRNA 233 | 233 | CGAAUGCUUCCAGAAGACC | 3131 | GGUCUUCUGGAAGCAUUCG |
| siRNA 234 | 234 | GAAUGCUUCCAGAAGACCU | 3132 | AGGUCUUCUGGAAGCAUUC |
| siRNA 235 | 235 | AAUGCUUCCAGAAGACCUA | 3133 | UAGGUCUUCUGGAAGCAUU |
| siRNA 236 | 236 | AUGCUUCCAGAAGACCUAC | 3134 | GUAGGUCUUCUGGAAGCAU |
| siRNA 237 | 237 | UGCUUCCAGAAGACCUACA | 3135 | UGUAGGUCUUCUGGAAGCA |
| siRNA 238 | 238 | GCUUCCAGAAGACCUACAC | 3136 | GUGUAGGUCUUCUGGAAGC |
| siRNA 239 | 239 | CUUCCAGAAGACCUACACC | 3137 | GGUGUAGGUCUUCUGGAAG |
| siRNA 240 | 240 | UUCCAGAAGACCUACACCA | 3138 | UGGUGUAGGUCUUCUGGAA |
| siRNA 241 | 241 | UCCAGAAGACCUACACCAG | 3139 | CUGGUGUAGGUCUUCUGGA |
| siRNA 242 | 242 | CCAGAAGACCUACACCAGC | 3140 | GCUGGUGUAGGUCUUCUGG |
| siRNA 243 | 243 | CAGAAGACCUACACCAGCA | 3141 | UGCUGGUGUAGGUCUUCUG |
| siRNA 244 | 244 | AGAAGACCUACACCAGCAC | 3142 | GUGCUGGUGUAGGUCUUCU |
| siRNA 245 | 245 | GAAGACCUACACCAGCACU | 3143 | AGUGCUGGUGUAGGUCUUC |
| siRNA 246 | 246 | AAGACCUACACCAGCACUA | 3144 | UAGUGCUGGUGUAGGUCUU |
| siRNA 247 | 247 | AGACCUACACCAGCACUAA | 3145 | UUAGUGCUGGUGUAGGUCU |
| siRNA 248 | 248 | GACCUACACCAGCACUAAG | 3146 | CUUAGUGCUGGUGUAGGUC |
| siRNA 249 | 249 | ACCUACACCAGCACUAAGG | 3147 | CCUUAGUGCUGGUGUAGGU |
| siRNA 250 | 250 | CCUACACCAGCACUAAGGA | 3148 | UCCUUAGUGCUGGUGUAGG |
| siRNA 251 | 251 | CUACACCAGCACUAAGGAA | 3149 | UUCCUUAGUGCUGGUGUAG |
| siRNA 252 | 252 | UACACCAGCACUAAGGAAG | 3150 | CUUCCUUAGUGCUGGUGUA |
| siRNA 253 | 253 | ACACCAGCACUAAGGAAGC | 3151 | GCUUCCUUAGUGCUGGUGU |
| siRNA 254 | 254 | CACCAGCACUAAGGAAGCC | 3152 | GGCUUCCUUAGUGCUGGUG |
| siRNA 255 | 255 | ACCAGCACUAAGGAAGCCC | 3153 | GGGCUUCCUUAGUGCUGGU |
| siRNA 256 | 256 | CCAGCACUAAGGAAGCCCA | 3154 | UGGGCUUCCUUAGUGCUGG |
| siRNA 257 | 257 | CAGCACUAAGGAAGCCCAC | 3155 | GUGGGCUUCCUUAGUGCUG |
| siRNA 258 | 258 | AGCACUAAGGAAGCCCACC | 3156 | GGUGGGCUUCCUUAGUGCU |
| siRNA 259 | 259 | GCACUAAGGAAGCCCACCC | 3157 | GGGUGGGCUUCCUUAGUGC |
| siRNA 260 | 260 | CACUAAGGAAGCCCACCCC | 3158 | GGGGUGGGCUUCCUUAGUG |
| siRNA 261 | 261 | ACUAAGGAAGCCCACCCCC | 3159 | GGGGGUGGGCUUCCUUAGU |
| siRNA 262 | 262 | CUAAGGAAGCCCACCCCCU | 3160 | AGGGGGUGGGCUUCCUUAG |
| siRNA 263 | 263 | UAAGGAAGCCCACCCCCUG | 3161 | CAGGGGGUGGGCUUCCUUA |
| siRNA 264 | 264 | AAGGAAGCCCACCCCCUGG | 3162 | CCAGGGGGUGGGCUUCCUU |
| siRNA 265 | 265 | AGGAAGCCCACCCCCUGGU | 3163 | ACCAGGGGGUGGGCUUCCU |
| siRNA 266 | 266 | GGAAGCCCACCCCCUGGUG | 3164 | CACCAGGGGGUGGGCUUCC |
| siRNA 267 | 267 | GAAGCCCACCCCCUGGUGG | 3165 | CCACCAGGGGGUGGGCUUC |
| siRNA 268 | 268 | AAGCCCACCCCCUGGUGGC | 3166 | GCCACCAGGGGGUGGGCUU |
| siRNA 269 | 269 | AGCCCACCCCCUGGUGGCC | 3167 | GGCCACCAGGGGGUGGGCU |
| siRNA 270 | 270 | GCCCACCCCCUGGUGGCCU | 3168 | AGGCCACCAGGGGGUGGGC |
| siRNA 271 | 271 | CCCACCCCCUGGUGGCCUC | 3169 | GAGGCCACCAGGGGGGGG |
| siRNA 272 | 272 | CCACCCCCUGGUGGCCUCU | 3170 | AGAGGCCACCAGGGGGUGG |
| siRNA 273 | 273 | CACCCCCUGGUGGCCUCUG | 3171 | CAGAGGCCACCAGGGGGUG |
| siRNA 274 | 274 | ACCCCCUGGUGGCCUCUGU | 3172 | ACAGAGGCCACCAGGGGGU |
| siRNA 275 | 275 | CCCCCUGGUGGCCUCUGUG | 3173 | CACAGAGGCCACCAGGGGG |
| siRNA 276 | 276 | CCCCUGGUGGCCUCUGUGU | 3174 | ACACAGAGGCCACCAGGGG |
| siRNA 277 | 277 | CCCUGGUGGCCUCUGUGUG | 3175 | CACACAGAGGCCACCAGGG |
| siRNA 278 | 278 | CCUGGUGGCCUCUGUGUGC | 3176 | GCACACAGAGGCCACCAGG |
| siRNA 279 | 279 | CUGGUGGCCUCUGUGUGCA | 3177 | UGCACACAGAGGCCACCAG |
| siRNA 280 | 280 | UGGUGGCCUCUGUGUGCAA | 3178 | UUGCACACAGAGGCCACCA |
| siRNA 281 | 281 | GGUGGCCUCUGUGUGCAAU | 3179 | AUUGCACACAGAGGCCACC |
| siRNA 282 | 282 | GUGGCCUCUGUGUGCAAUG | 3180 | CAUUGCACACAGAGGCCAC |
| siRNA 283 | 283 | UGGCCUCUGUGUGCAAUGC | 3181 | GCAUUGCACACAGAGGCCA |
| siRNA 284 | 284 | GGCCUCUGUGUGCAAUGCC | 3182 | GGCAUUGCACACAGAGGCC |
| siRNA 285 | 285 | GCCUCUGUGUGCAAUGCCU | 3183 | AGGCAUUGCACACAGAGGC |
| siRNA 286 | 286 | CCUCUGUGUGCAAUGCCUA | 3184 | UAGGCAUUGCACACAGAGG |
| siRNA 287 | 287 | CUCUGUGUGCAAUGCCUAU | 3185 | AUAGGCAUUGCACACAGAG |
| siRNA 288 | 288 | UCUGUGUGCAAUGCCUAUG | 3186 | CAUAGGCAUUGCACACAGA |
| siRNA 289 | 289 | CUGUGUGCAAUGCCUAUGA | 3187 | UCAUAGGCAUUGCACACAG |
| siRNA 290 | 290 | UGUGUGCAAUGCCUAUGAG | 3188 | CUCAUAGGCAUUGCACACA |
| siRNA 291 | 291 | GUGUGCAAUGCCUAUGAGA | 3189 | UCUCAUAGGCAUUGCACAC |
| siRNA 292 | 292 | UGUGCAAUGCCUAUGAGAA | 3190 | UUCUCAUAGGCAUUGCACA |
| siRNA 293 | 293 | GUGCAAUGCCUAUGAGAAG | 3191 | CUUCUCAUAGGCAUUGCAC |
| siRNA 294 | 294 | UGCAAUGCCUAUGAGAAGG | 3192 | CCUUCUCAUAGGCAUUGCA |
| siRNA 295 | 295 | GCAAUGCCUAUGAGAAGGG | 3193 | CCCUUCUCAUAGGCAUUGC |
| siRNA 296 | 296 | CAAUGCCUAUGAGAAGGGC | 3194 | GCCCUUCUCAUAGGCAUUG |
| siRNA 297 | 297 | AAUGCCUAUGAGAAGGGCG | 3195 | CGCCCUUCUCAUAGGCAUU |
| siRNA 298 | 298 | AUGCCUAUGAGAAGGGCGU | 3196 | ACGCCCUUCUCAUAGGCAU |
| siRNA 299 | 299 | UGCCUAUGAGAAGGGCGUG | 3197 | CACGCCCUUCUCAUAGGCA |
| siRNA 300 | 300 | GCCUAUGAGAAGGGCGUGC | 3198 | GCACGCCCUUCUCAUAGGC |
| siRNA 301 | 301 | CCUAUGAGAAGGGCGUGCA | 3199 | UGCACGCCCUUCUCAUAGG |
| siRNA 302 | 302 | CUAUGAGAAGGGCGUGCAG | 3200 | CUGCACGCCCUUCUCAUAG |
| siRNA 303 | 303 | UAUGAGAAGGGCGUGCAGA | 3201 | UCUGCACGCCCUUCUCAUA |
| siRNA 304 | 304 | AUGAGAAGGGCGUGCAGAG | 3202 | CUCUGCACGCCCUUCUCAU |
| siRNA 305 | 305 | UGAGAAGGGCGUGCAGAGC | 3203 | GCUCUGCACGCCCUUCUCA |
| siRNA 306 | 306 | GAGAAGGGCGUGCAGAGCG | 3204 | CGCUCUGCACGCCCUUCUC |
| siRNA 307 | 307 | AGAAGGGCGUGCAGAGCGC | 3205 | GCGCUCUGCACGCCCUUCU |
| siRNA 308 | 308 | GAAGGGCGUGCAGAGCGCC | 3206 | GGCGCUCUGCACGCCCUUC |
| siRNA 309 | 309 | AAGGGCGUGCAGAGCGCCA | 3207 | UGGCGCUCUGCACGCCCUU |
| siRNA 310 | 310 | AGGGCGUGCAGAGCGCCAG | 3208 | CUGGCGCUCUGCACGCCCU |
| siRNA 311 | 311 | GGGCGUGCAGAGCGCCAGU | 3209 | ACUGGCGCUCUGCACGCCC |
| siRNA 312 | 312 | GGCGUGCAGAGCGCCAGUA | 3210 | UACUGGCGCUCUGCACGCC |
| siRNA 313 | 313 | GCGUGCAGAGCGCCAGUAG | 3211 | CUACUGGCGCUCUGCACGC |
| siRNA 314 | 314 | CGUGCAGAGCGCCAGUAGC | 3212 | GCUACUGGCGCUCUGCACG |
| siRNA 315 | 315 | GUGCAGAGCGCCAGUAGCU | 3213 | AGCUACUGGCGCUCUGCAC |
| siRNA 316 | 316 | UGCAGAGCGCCAGUAGCUU | 3214 | AAGCUACUGGCGCUCUGCA |
| siRNA 317 | 317 | GCAGAGCGCCAGUAGCUUG | 3215 | CAAGCUACUGGCGCUCUGC |
| siRNA 318 | 318 | CAGAGCGCCAGUAGCUUGG | 3216 | CCAAGCUACUGGCGCUCUG |
| siRNA 319 | 319 | AGAGCGCCAGUAGCUUGGC | 3217 | GCCAAGCUACUGGCGCUCU |
| siRNA 320 | 320 | GAGCGCCAGUAGCUUGGCU | 3218 | AGCCAAGCUACUGGCGCUC |
| siRNA 321 | 321 | AGCGCCAGUAGCUUGGCUG | 3219 | CAGCCAAGCUACUGGCGCU |
| siRNA 322 | 322 | GCGCCAGUAGCUUGGCUGC | 3220 | GCAGCCAAGCUACUGGCGC |
| siRNA 323 | 323 | CGCCAGUAGCUUGGCUGCC | 3221 | GGCAGCCAAGCUACUGGCG |
| siRNA 324 | 324 | GCCAGUAGCUUGGCUGCCU | 3222 | AGGCAGCCAAGCUACUGGC |
| siRNA 325 | 325 | CCAGUAGCUUGGCUGCCUG | 3223 | CAGGCAGCCAAGCUACUGG |
| siRNA 326 | 326 | CAGUAGCUUGGCUGCCUGG | 3224 | CCAGGCAGCCAAGCUACUG |
| siRNA 327 | 327 | AGUAGCUUGGCUGCCUGGA | 3225 | UCCAGGCAGCCAAGCUACU |
| siRNA 328 | 328 | GUAGCUUGGCUGCCUGGAG | 3226 | CUCCAGGCAGCCAAGCUAC |
| siRNA 329 | 329 | UAGCUUGGCUGCCUGGAGC | 3227 | GCUCCAGGCAGCCAAGCUA |
| siRNA 330 | 330 | AGCUUGGCUGCCUGGAGCA | 3228 | UGCUCCAGGCAGCCAAGCU |
| siRNA 331 | 331 | GCUUGGCUGCCUGGAGCAU | 3229 | AUGCUCCAGGCAGCCAAGC |
| SiRNA 332 | 332 | CUUGGCUGCCUGGAGCAUG | 3230 | CAUGCUCCAGGCAGCCAAG |
| siRNA 333 | 333 | UUGGCUGCCUGGAGCAUGG | 3231 | CCAUGCUCCAGGCAGCCAA |
| siRNA 334 | 334 | UGGCUGCCUGGAGCAUGGA | 3232 | UCCAUGCUCCAGGCAGCCA |
| siRNA 335 | 335 | GGCUGCCUGGAGCAUGGAG | 3233 | CUCCAUGCUCCAGGCAGCC |
| siRNA 336 | 336 | GCUGCCUGGAGCAUGGAGC | 3234 | GCUCCAUGCUCCAGGCAGC |
| siRNA 337 | 337 | CUGCCUGGAGCAUGGAGCC | 3235 | GGCUCCAUGCUCCAGGCAG |
| siRNA 338 | 338 | UGCCUGGAGCAUGGAGCCG | 3236 | CGGCUCCAUGCUCCAGGCA |
| siRNA 339 | 339 | GCCUGGAGCAUGGAGCCGG | 3237 | CCGGCUCCAUGCUCCAGGC |
| siRNA 340 | 340 | CCUGGAGCAUGGAGCCGGU | 3238 | ACCGGCUCCAUGCUCCAGG |
| siRNA 341 | 341 | CUGGAGCAUGGAGCCGGUG | 3239 | CACCGGCUCCAUGCUCCAG |
| siRNA 342 | 342 | UGGAGCAUGGAGCCGGUGG | 3240 | CCACCGGCUCCAUGCUCCA |
| siRNA 343 | 343 | GGAGCAUGGAGCCGGUGGU | 3241 | ACCACCGGCUCCAUGCUCC |
| siRNA 344 | 344 | GAGCAUGGAGCCGGUGGUC | 3242 | GACCACCGGCUCCAUGCUC |
| siRNA 345 | 345 | AGCAUGGAGCCGGUGGUCC | 3243 | GGACCACCGGCUCCAUGCU |
| siRNA 346 | 346 | GCAUGGAGCCGGUGGUCCG | 3244 | CGGACCACCGGCUCCAUGC |
| siRNA 347 | 347 | CAUGGAGCCGGUGGUCCGC | 3245 | GCGGACCACCGGCUCCAUG |
| siRNA 348 | 348 | AUGGAGCCGGUGGUCCGCA | 3246 | UGCGGACCACCGGCUCCAU |
| siRNA 349 | 349 | UGGAGCCGGUGGUCCGCAG | 3247 | CUGCGGACCACCGGCUCCA |
| siRNA 350 | 350 | GGAGCCGGUGGUCCGCAGG | 3248 | CCUGCGGACCACCGGCUCC |
| siRNA 351 | 351 | GAGCCGGUGGUCCGCAGGC | 3249 | GCCUGCGGACCACCGGCUC |
| siRNA 352 | 352 | AGCCGGUGGUCCGCAGGCU | 3250 | AGCCUGCGGACCACCGGCU |
| siRNA 353 | 353 | GCCGGUGGUCCGCAGGCUG | 3251 | CAGCCUGCGGACCACCGGC |
| siRNA 354 | 354 | CCGGUGGUCCGCAGGCUGU | 3252 | ACAGCCUGCGGACCACCGG |
| siRNA 355 | 355 | CGGUGGUCCGCAGGCUGUC | 3253 | GACAGCCUGCGGACCACCG |
| siRNA 356 | 356 | GGUGGUCCGCAGGCUGUCC | 3254 | GGACAGCCUGCGGACCACC |
| siRNA 357 | 357 | GUGGUCCGCAGGCUGUCCA | 3255 | UGGACAGCCUGCGGACCAC |
| siRNA 358 | 358 | UGGUCCGCAGGCUGUCCAC | 3256 | GUGGACAGCCUGCGGACCA |
| siRNA 359 | 359 | GGUCCGCAGGCUGUCCACC | 3257 | GGUGGACAGCCUGCGGACC |
| siRNA 360 | 360 | GUCCGCAGGCUGUCCACCC | 3258 | GGGUGGACAGCCUGCGGAC |
| siRNA 361 | 361 | UCCGCAGGCUGUCCACCCA | 3259 | UGGGUGGACAGCCUGCGGA |
| siRNA 362 | 362 | CCGCAGGCUGUCCACCCAG | 3260 | CUGGGUGGACAGCCUGCGG |
| siRNA 363 | 363 | CGCAGGCUGUCCACCCAGU | 3261 | ACUGGGUGGACAGCCUGCG |
| siRNA 364 | 364 | GCAGGCUGUCCACCCAGUU | 3262 | AACUGGGUGGACAGCCUGC |
| siRNA 365 | 365 | CAGGCUGUCCACCCAGUUC | 3263 | GAACUGGGUGGACAGCCUG |
| siRNA 366 | 366 | AGGCUGUCCACCCAGUUCA | 3264 | UGAACUGGGUGGACAGCCU |
| siRNA 367 | 367 | GGCUGUCCACCCAGUUCAC | 3265 | GUGAACUGGGUGGACAGCC |
| siRNA 368 | 368 | GCUGUCCACCCAGUUCACA | 3266 | UGUGAACUGGGUGGACAGC |
| siRNA 369 | 369 | CUGUCCACCCAGUUCACAG | 3267 | CUGUGAACUGGGUGGACAG |
| siRNA 370 | 370 | UGUCCACCCAGUUCACAGC | 3268 | GCUGUGAACUGGGUGGACA |
| siRNA 371 | 371 | GUCCACCCAGUUCACAGCU | 3269 | AGCUGUGAACUGGGUGGAC |
| siRNA 372 | 372 | UCCACCCAGUUCACAGCUG | 3270 | CAGCUGUGAACUGGGUGGA |
| siRNA 373 | 373 | CCACCCAGUUCACAGCUGC | 3271 | GCAGCUGUGAACUGGGUGG |
| siRNA 374 | 374 | CACCCAGUUCACAGCUGCC | 3272 | GGCAGCUGUGAACUGGGUG |
| siRNA 375 | 375 | ACCCAGUUCACAGCUGCCA | 3273 | UGGCAGCUGUGAACUGGGU |
| siRNA 376 | 376 | CCCAGUUCACAGCUGCCAA | 3274 | UUGGCAGCUGUGAACUGGG |
| siRNA 377 | 377 | CCAGUUCACAGCUGCCAAU | 3275 | AUUGGCAGCUGUGAACUGG |
| siRNA 378 | 378 | CAGUUCACAGCUGCCAAUG | 3276 | CAUUGGCAGCUGUGAACUG |
| siRNA 379 | 379 | AGUUCACAGCUGCCAAUGA | 3277 | UCAUUGGCAGCUGUGAACU |
| siRNA 380 | 380 | GUUCACAGCUGCCAAUGAG | 3278 | CUCAUUGGCAGCUGUGAAC |
| siRNA 381 | 381 | UUCACAGCUGCCAAUGAGC | 3279 | GCUCAUUGGCAGCUGUGAA |
| siRNA 382 | 382 | UCACAGCUGCCAAUGAGCU | 3280 | AGCUCAUUGGCAGCUGUGA |
| siRNA 383 | 383 | CACAGCUGCCAAUGAGCUG | 3281 | CAGCUCAUUGGCAGCUGUG |
| siRNA 384 | 384 | ACAGCUGCCAAUGAGCUGG | 3282 | CCAGCUCAUUGGCAGCUGU |
| siRNA 385 | 385 | CAGCUGCCAAUGAGCUGGC | 3283 | GCCAGCUCAUUGGCAGCUG |
| siRNA 386 | 386 | AGCUGCCAAUGAGCUGGCC | 3284 | GGCCAGCUCAUUGGCAGCU |
| siRNA 387 | 387 | GCUGCCAAUGAGCUGGCCU | 3285 | AGGCCAGCUCAUUGGCAGC |
| siRNA 388 | 388 | CUGCCAAUGAGCUGGCCUG | 3286 | CAGGCCAGCUCAUUGGCAG |
| siRNA 389 | 389 | UGCCAAUGAGCUGGCCUGC | 3287 | GCAGGCCAGCUCAUUGGCA |
| siRNA 390 | 390 | GCCAAUGAGCUGGCCUGCC | 3288 | GGCAGGCCAGCUCAUUGGC |
| siRNA 391 | 391 | CCAAUGAGCUGGCCUGCCG | 3289 | CGGCAGGCCAGCUCAUUGG |
| siRNA 392 | 392 | CAAUGAGCUGGCCUGCCGA | 3290 | UCGGCAGGCCAGCUCAUUG |
| siRNA 393 | 393 | AAUGAGCUGGCCUGCCGAG | 3291 | CUCGGCAGGCCAGCUCAUU |
| siRNA 394 | 394 | AUGAGCUGGCCUGCCGAGG | 3292 | CCUCGGCAGGCCAGCUCAU |
| siRNA 395 | 395 | UGAGCUGGCCUGCCGAGGC | 3293 | GCCUCGGCAGGCCAGCUCA |
| siRNA 396 | 396 | GAGCUGGCCUGCCGAGGCU | 3294 | AGCCUCGGCAGGCCAGCUC |
| siRNA 397 | 397 | AGCUGGCCUGCCGAGGCUU | 3295 | AAGCCUCGGCAGGCCAGCU |
| siRNA 398 | 398 | GCUGGCCUGCCGAGGCUUG | 3296 | CAAGCCUCGGCAGGCCAGC |
| siRNA 399 | 399 | CUGGCCUGCCGAGGCUUGG | 3297 | CCAAGCCUCGGCAGGCCAG |
| siRNA 400 | 400 | UGGCCUGCCGAGGCUUGGA | 3298 | UCCAAGCCUCGGCAGGCCA |
| siRNA 401 | 401 | GGCCUGCCGAGGCUUGGAC | 3299 | GUCCAAGCCUCGGCAGGCC |
| siRNA 402 | 402 | GCCUGCCGAGGCUUGGACC | 3300 | GGUCCAAGCCUCGGCAGGC |
| siRNA 403 | 403 | CCUGCCGAGGCUUGGACCA | 3301 | UGGUCCAAGCCUCGGCAGG |
| siRNA 404 | 404 | CUGCCGAGGCUUGGACCAC | 3302 | GUGGUCCAAGCCUCGGCAG |
| siRNA 405 | 405 | UGCCGAGGCUUGGACCACC | 3303 | GGUGGUCCAAGCCUCGGCA |
| siRNA 406 | 406 | GCCGAGGCUUGGACCACCU | 3304 | AGGUGGUCCAAGCCUCGGC |
| siRNA 407 | 407 | CCGAGGCUUGGACCACCUG | 3305 | CAGGUGGUCCAAGCCUCGG |
| siRNA 408 | 408 | CGAGGCUUGGACCACCUGG | 3306 | CCAGGUGGUCCAAGCCUCG |
| siRNA 409 | 409 | GAGGCUUGGACCACCUGGA | 3307 | UCCAGGUGGUCCAAGCCUC |
| siRNA 410 | 410 | AGGCUUGGACCACCUGGAG | 3308 | CUCCAGGUGGUCCAAGCCU |
| siRNA 411 | 411 | GGCUUGGACCACCUGGAGG | 3309 | CCUCCAGGUGGUCCAAGCC |
| siRNA 412 | 412 | GCUUGGACCACCUGGAGGA | 3310 | UCCUCCAGGUGGUCCAAGC |
| siRNA 413 | 413 | CUUGGACCACCUGGAGGAA | 3311 | UUCCUCCAGGUGGUCCAAG |
| siRNA 414 | 414 | UUGGACCACCUGGAGGAAA | 3312 | UUUCCUCCAGGUGGUCCAA |
| siRNA 415 | 415 | UGGACCACCUGGAGGAAAA | 3313 | UUUUCCUCCAGGUGGUCCA |
| siRNA 416 | 416 | GGACCACCUGGAGGAAAAG | 3314 | CUUUUCCUCCAGGUGGUCC |
| siRNA 417 | 417 | GACCACCUGGAGGAAAAGA | 3315 | UCUUUUCCUCCAGGUGGUC |
| siRNA 418 | 418 | ACCACCUGGAGGAAAAGAU | 3316 | AUCUUUUCCUCCAGGUGGU |
| siRNA 419 | 419 | CCACCUGGAGGAAAAGAUC | 3317 | GAUCUUUUCCUCCAGGUGG |
| siRNA 420 | 420 | CACCUGGAGGAAAAGAUCC | 3318 | GGAUCUUUUCCUCCAGGUG |
| siRNA 421 | 421 | ACCUGGAGGAAAAGAUCCC | 3319 | GGGAUCUUUUCCUCCAGGU |
| siRNA 422 | 422 | CCUGGAGGAAAAGAUCCCC | 3320 | GGGGAUCUUUUCCUCCAGG |
| siRNA 423 | 423 | CUGGAGGAAAAGAUCCCCG | 3321 | CGGGGAUCUUUUCCUCCAG |
| siRNA 424 | 424 | UGGAGGAAAAGAUCCCCGC | 3322 | GCGGGGAUCUUUUCCUCCA |
| siRNA 425 | 425 | GGAGGAAAAGAUCCCCGCC | 3323 | GGCGGGGAUCUUUUCCUCC |
| siRNA 426 | 426 | GAGGAAAAGAUCCCCGCCC | 3324 | GGGCGGGGAUCUUUUCCUC |
| siRNA 427 | 427 | AGGAAAAGAUCCCCGCCCU | 3325 | AGGGGGGGGAUCUUUUCCU |
| siRNA 428 | 428 | GGAAAAGAUCCCCGCCCUC | 3326 | GAGGGGGGGGAUCUUUUCC |
| siRNA 429 | 429 | GAAAAGAUCCCCGCCCUCC | 3327 | GGAGGGCGGGGAUCUUUUC |
| siRNA 430 | 430 | AAAAGAUCCCCGCCCUCCA | 3328 | UGGAGGGGGGGGAUCUUUU |
| siRNA 431 | 431 | AAAGAUCCCCGCCCUCCAG | 3329 | CUGGAGGGGGGGGAUCUUU |
| siRNA 432 | 432 | AAGAUCCCCGCCCUCCAGU | 3330 | ACUGGAGGGGGGGGAUCUU |
| siRNA 433 | 433 | AGAUCCCCGCCCUCCAGUA | 3331 | UACUGGAGGGGGGGGAUCU |
| siRNA 434 | 434 | GAUCCCCGCCCUCCAGUAC | 3332 | GUACUGGAGGGGGGGGAUC |
| siRNA 435 | 435 | AUCCCCGCCCUCCAGUACC | 3333 | GGUACUGGAGGGCGGGGAU |
| siRNA 436 | 436 | UCCCCGCCCUCCAGUACCC | 3334 | GGGUACUGGAGGGGGGGGA |
| siRNA 437 | 437 | CCCCGCCCUCCAGUACCCC | 3335 | GGGGUACUGGAGGGCGGGG |
| siRNA 438 | 438 | CCCGCCCUCCAGUACCCCC | 3336 | GGGGGUACUGGAGGGCGGG |
| siRNA 439 | 439 | CCGCCCUCCAGUACCCCCC | 3337 | GGGGGGUACUGGAGGGCGG |
| siRNA 440 | 440 | CGCCCUCCAGUACCCCCCU | 3338 | AGGGGGGUACUGGAGGGCG |
| siRNA 441 | 441 | GCCCUCCAGUACCCCCCUG | 3339 | CAGGGGGGUACUGGAGGGC |
| siRNA 442 | 442 | CCCUCCAGUACCCCCCUGA | 3340 | UCAGGGGGGUACUGGAGGG |
| siRNA 443 | 443 | CCUCCAGUACCCCCCUGAA | 3341 | UUCAGGGGGGUACUGGAGG |
| siRNA 444 | 444 | CUCCAGUACCCCCCUGAAA | 3342 | UUUCAGGGGGGUACUGGAG |
| siRNA 445 | 445 | UCCAGUACCCCCCUGAAAA | 3343 | UUUUCAGGGGGGUACUGGA |
| siRNA 446 | 446 | CCAGUACCCCCCUGAAAAG | 3344 | CUUUUCAGGGGGGUACUGG |
| siRNA 447 | 447 | CAGUACCCCCCUGAAAAGA | 3345 | UCUUUUCAGGGGGGUACUG |
| siRNA 448 | 448 | AGUACCCCCCUGAAAAGAU | 3346 | AUCUUUUCAGGGGGGUACU |
| siRNA 449 | 449 | GUACCCCCCUGAAAAGAUU | 3347 | AAUCUUUUCAGGGGGGUAC |
| siRNA 450 | 450 | UACCCCCCUGAAAAGAUUG | 3348 | CAAUCUUUUCAGGGGGGUA |
| siRNA 451 | 451 | ACCCCCCUGAAAAGAUUGC | 3349 | GCAAUCUUUUCAGGGGGGU |
| siRNA 452 | 452 | CCCCCCUGAAAAGAUUGCU | 3350 | AGCAAUCUUUUCAGGGGGG |
| siRNA 453 | 453 | CCCCCUGAAAAGAUUGCUU | 3351 | AAGCAAUCUUUUCAGGGGG |
| siRNA 454 | 454 | CCCCUGAAAAGAUUGCUUC | 3352 | GAAGCAAUCUUUUCAGGGG |
| siRNA 455 | 455 | CCCUGAAAAGAUUGCUUCU | 3353 | AGAAGCAAUCUUUUCAGGG |
| siRNA 456 | 456 | CCUGAAAAGAUUGCUUCUG | 3354 | CAGAAGCAAUCUUUUCAGG |
| siRNA 457 | 457 | CUGAAAAGAUUGCUUCUGA | 3355 | UCAGAAGCAAUCUUUUCAG |
| siRNA 458 | 458 | UGAAAAGAUUGCUUCUGAG | 3356 | CUCAGAAGCAAUCUUUUCA |
| siRNA 459 | 459 | GAAAAGAUUGCUUCUGAGC | 3357 | GCUCAGAAGCAAUCUUUUC |
| siRNA 460 | 460 | AAAAGAUUGCUUCUGAGCU | 3358 | AGCUCAGAAGCAAUCUUUU |
| siRNA 461 | 461 | AAAGAUUGCUUCUGAGCUG | 3359 | CAGCUCAGAAGCAAUCUUU |
| siRNA 462 | 462 | AAGAUUGCUUCUGAGCUGA | 3360 | UCAGCUCAGAAGCAAUCUU |
| siRNA 463 | 463 | AGAUUGCUUCUGAGCUGAA | 3361 | UUCAGCUCAGAAGCAAUCU |
| siRNA 464 | 464 | GAUUGCUUCUGAGCUGAAG | 3362 | CUUCAGCUCAGAAGCAAUC |
| siRNA 465 | 465 | AUUGCUUCUGAGCUGAAGG | 3363 | CCUUCAGCUCAGAAGCAAU |
| siRNA 466 | 466 | UUGCUUCUGAGCUGAAGGA | 3364 | UCCUUCAGCUCAGAAGCAA |
| siRNA 467 | 467 | UGCUUCUGAGCUGAAGGAC | 3365 | GUCCUUCAGCUCAGAAGCA |
| siRNA 468 | 468 | GCUUCUGAGCUGAAGGACA | 3366 | UGUCCUUCAGCUCAGAAGC |
| siRNA 469 | 469 | CUUCUGAGCUGAAGGACAC | 3367 | GUGUCCUUCAGCUCAGAAG |
| siRNA 470 | 470 | UUCUGAGCUGAAGGACACC | 3368 | GGUGUCCUUCAGCUCAGAA |
| siRNA 471 | 471 | UCUGAGCUGAAGGACACCA | 3369 | UGGUGUCCUUCAGCUCAGA |
| siRNA 472 | 472 | CUGAGCUGAAGGACACCAU | 3370 | AUGGUGUCCUUCAGCUCAG |
| siRNA 473 | 473 | UGAGCUGAAGGACACCAUC | 3371 | GAUGGUGUCCUUCAGCUCA |
| siRNA 474 | 474 | GAGCUGAAGGACACCAUCU | 3372 | AGAUGGUGUCCUUCAGCUC |
| siRNA 475 | 475 | AGCUGAAGGACACCAUCUC | 3373 | GAGAUGGUGUCCUUCAGCU |
| siRNA 476 | 476 | GCUGAAGGACACCAUCUCC | 3374 | GGAGAUGGUGUCCUUCAGC |
| siRNA 477 | 477 | CUGAAGGACACCAUCUCCA | 3375 | UGGAGAUGGUGUCCUUCAG |
| siRNA 478 | 478 | UGAAGGACACCAUCUCCAC | 3376 | GUGGAGAUGGUGUCCUUCA |
| siRNA 479 | 479 | GAAGGACACCAUCUCCACC | 3377 | GGUGGAGAUGGUGUCCUUC |
| siRNA 480 | 480 | AAGGACACCAUCUCCACCC | 3378 | GGGUGGAGAUGGUGUCCUU |
| siRNA 481 | 481 | AGGACACCAUCUCCACCCG | 3379 | CGGGUGGAGAUGGUGUCCU |
| siRNA 482 | 482 | GGACACCAUCUCCACCCGC | 3380 | GCGGGUGGAGAUGGUGUCC |
| siRNA 483 | 483 | GACACCAUCUCCACCCGCC | 3381 | GGCGGGUGGAGAUGGUGUC |
| siRNA 484 | 484 | ACACCAUCUCCACCCGCCU | 3382 | AGGCGGGUGGAGAUGGUGU |
| siRNA 485 | 485 | CACCAUCUCCACCCGCCUC | 3383 | GAGGCGGGUGGAGAUGGUG |
| siRNA 486 | 486 | ACCAUCUCCACCCGCCUCC | 3384 | GGAGGCGGGUGGAGAUGGU |
| siRNA 487 | 487 | CCAUCUCCACCCGCCUCCG | 3385 | CGGAGGCGGGUGGAGAUGG |
| siRNA 488 | 488 | CAUCUCCACCCGCCUCCGC | 3386 | GCGGAGGCGGGUGGAGAUG |
| siRNA 489 | 489 | AUCUCCACCCGCCUCCGCA | 3387 | UGCGGAGGCGGGUGGAGAU |
| siRNA 490 | 490 | UCUCCACCCGCCUCCGCAG | 3388 | CUGCGGAGGCGGGUGGAGA |
| siRNA 491 | 491 | CUCCACCCGCCUCCGCAGU | 3389 | ACUGCGGAGGCGGGUGGAG |
| siRNA 492 | 492 | UCCACCCGCCUCCGCAGUG | 3390 | CACUGCGGAGGCGGGUGGA |
| siRNA 493 | 493 | CCACCCGCCUCCGCAGUGC | 3391 | GCACUGCGGAGGCGGGUGG |
| siRNA 494 | 494 | CACCCGCCUCCGCAGUGCC | 3392 | GGCACUGCGGAGGCGGGUG |
| siRNA 495 | 495 | ACCCGCCUCCGCAGUGCCA | 3393 | UGGCACUGCGGAGGCGGGU |
| siRNA 496 | 496 | CCCGCCUCCGCAGUGCCAG | 3394 | CUGGCACUGCGGAGGCGGG |
| siRNA 497 | 497 | CCGCCUCCGCAGUGCCAGA | 3395 | UCUGGCACUGCGGAGGCGG |
| siRNA 498 | 498 | CGCCUCCGCAGUGCCAGAA | 3396 | UUCUGGCACUGCGGAGGCG |
| siRNA 499 | 499 | GCCUCCGCAGUGCCAGAAA | 3397 | UUUCUGGCACUGCGGAGGC |
| siRNA 500 | 500 | CCUCCGCAGUGCCAGAAAC | 3398 | GUUUCUGGCACUGCGGAGG |
| siRNA 501 | 501 | CUCCGCAGUGCCAGAAACA | 3399 | UGUUUCUGGCACUGCGGAG |
| siRNA 502 | 502 | UCCGCAGUGCCAGAAACAG | 3400 | CUGUUUCUGGCACUGCGGA |
| siRNA 503 | 503 | CCGCAGUGCCAGAAACAGC | 3401 | GCUGUUUCUGGCACUGCGG |
| siRNA 504 | 504 | CGCAGUGCCAGAAACAGCA | 3402 | UGCUGUUUCUGGCACUGCG |
| siRNA 505 | 505 | GCAGUGCCAGAAACAGCAU | 3403 | AUGCUGUUUCUGGCACUGC |
| siRNA 506 | 506 | CAGUGCCAGAAACAGCAUC | 3404 | GAUGCUGUUUCUGGCACUG |
| siRNA 507 | 507 | AGUGCCAGAAACAGCAUCA | 3405 | UGAUGCUGUUUCUGGCACU |
| siRNA 508 | 508 | GUGCCAGAAACAGCAUCAG | 3406 | CUGAUGCUGUUUCUGGCAC |
| siRNA 509 | 509 | UGCCAGAAACAGCAUCAGC | 3407 | GCUGAUGCUGUUUCUGGCA |
| siRNA 510 | 510 | GCCAGAAACAGCAUCAGCG | 3408 | CGCUGAUGCUGUUUCUGGC |
| siRNA 511 | 511 | CCAGAAACAGCAUCAGCGU | 3409 | ACGCUGAUGCUGUUUCUGG |
| siRNA 512 | 512 | CAGAAACAGCAUCAGCGUU | 3410 | AACGCUGAUGCUGUUUCUG |
| siRNA 513 | 513 | AGAAACAGCAUCAGCGUUC | 3411 | GAACGCUGAUGCUGUUUCU |
| siRNA 514 | 514 | GAAACAGCAUCAGCGUUCC | 3412 | GGAACGCUGAUGCUGUUUC |
| siRNA 515 | 515 | AAACAGCAUCAGCGUUCCC | 3413 | GGGAACGCUGAUGCUGUUU |
| siRNA 516 | 516 | AACAGCAUCAGCGUUCCCA | 3414 | UGGGAACGCUGAUGCUGUU |
| siRNA 517 | 517 | ACAGCAUCAGCGUUCCCAU | 3415 | AUGGGAACGCUGAUGCUGU |
| siRNA 518 | 518 | CAGCAUCAGCGUUCCCAUC | 3416 | GAUGGGAACGCUGAUGCUG |
| siRNA 519 | 519 | AGCAUCAGCGUUCCCAUCG | 3417 | CGAUGGGAACGCUGAUGCU |
| siRNA 520 | 520 | GCAUCAGCGUUCCCAUCGC | 3418 | GCGAUGGGAACGCUGAUGC |
| siRNA 521 | 521 | CAUCAGCGUUCCCAUCGCG | 3419 | CGCGAUGGGAACGCUGAUG |
| siRNA 522 | 522 | AUCAGCGUUCCCAUCGCGA | 3420 | UCGCGAUGGGAACGCUGAU |
| siRNA 523 | 523 | UCAGCGUUCCCAUCGCGAG | 3421 | CUCGCGAUGGGAACGCUGA |
| siRNA 524 | 524 | CAGCGUUCCCAUCGCGAGC | 3422 | GCUCGCGAUGGGAACGCUG |
| siRNA 525 | 525 | AGCGUUCCCAUCGCGAGCA | 3423 | UGCUCGCGAUGGGAACGCU |
| siRNA 526 | 526 | GCGUUCCCAUCGCGAGCAC | 3424 | GUGCUCGCGAUGGGAACGC |
| siRNA 527 | 527 | CGUUCCCAUCGCGAGCACU | 3425 | AGUGCUCGCGAUGGGAACG |
| siRNA 528 | 528 | GUUCCCAUCGCGAGCACUU | 3426 | AAGUGCUCGCGAUGGGAAC |
| siRNA 529 | 529 | UUCCCAUCGCGAGCACUUC | 3427 | GAAGUGCUCGCGAUGGGAA |
| siRNA 530 | 530 | UCCCAUCGCGAGCACUUCA | 3428 | UGAAGUGCUCGCGAUGGGA |
| siRNA 531 | 531 | CCCAUCGCGAGCACUUCAG | 3429 | CUGAAGUGCUCGCGAUGGG |
| siRNA 532 | 532 | CCAUCGCGAGCACUUCAGA | 3430 | UCUGAAGUGCUCGCGAUGG |
| siRNA 533 | 533 | CAUCGCGAGCACUUCAGAC | 3431 | GUCUGAAGUGCUCGCGAUG |
| siRNA 534 | 534 | AUCGCGAGCACUUCAGACA | 3432 | UGUCUGAAGUGCUCGCGAU |
| siRNA 535 | 535 | UCGCGAGCACUUCAGACAA | 3433 | UUGUCUGAAGUGCUCGCGA |
| siRNA 536 | 536 | CGCGAGCACUUCAGACAAG | 3434 | CUUGUCUGAAGUGCUCGCG |
| siRNA 537 | 537 | GCGAGCACUUCAGACAAGG | 3435 | CCUUGUCUGAAGUGCUCGC |
| siRNA 538 | 538 | CGAGCACUUCAGACAAGGU | 3436 | ACCUUGUCUGAAGUGCUCG |
| siRNA 539 | 539 | GAGCACUUCAGACAAGGUC | 3437 | GACCUUGUCUGAAGUGCUC |
| siRNA 540 | 540 | AGCACUUCAGACAAGGUCC | 3438 | GGACCUUGUCUGAAGUGCU |
| siRNA 541 | 541 | GCACUUCAGACAAGGUCCU | 3439 | AGGACCUUGUCUGAAGUGC |
| siRNA 542 | 542 | CACUUCAGACAAGGUCCUG | 3440 | CAGGACCUUGUCUGAAGUG |
| siRNA 543 | 543 | ACUUCAGACAAGGUCCUGG | 3441 | CCAGGACCUUGUCUGAAGU |
| siRNA 544 | 544 | CUUCAGACAAGGUCCUGGG | 3442 | CCCAGGACCUUGUCUGAAG |
| siRNA 545 | 545 | UUCAGACAAGGUCCUGGGG | 3443 | CCCCAGGACCUUGUCUGAA |
| siRNA 546 | 546 | UCAGACAAGGUCCUGGGGG | 3444 | CCCCCAGGACCUUGUCUGA |
| siRNA 547 | 547 | CAGACAAGGUCCUGGGGGC | 3445 | GCCCCCAGGACCUUGUCUG |
| siRNA 548 | 548 | AGACAAGGUCCUGGGGGCC | 3446 | GGCCCCCAGGACCUUGUCU |
| siRNA 549 | 549 | GACAAGGUCCUGGGGGCCG | 3447 | CGGCCCCCAGGACCUUGUC |
| siRNA 550 | 550 | ACAAGGUCCUGGGGGCCGC | 3448 | GCGGCCCCCAGGACCUUGU |
| siRNA 551 | 551 | CAAGGUCCUGGGGGCCGCU | 3449 | AGCGGCCCCCAGGACCUUG |
| siRNA 552 | 552 | AAGGUCCUGGGGGCCGCUU | 3450 | AAGCGGCCCCCAGGACCUU |
| siRNA 553 | 553 | AGGUCCUGGGGGCCGCUUU | 3451 | AAAGCGGCCCCCAGGACCU |
| siRNA 554 | 554 | GGUCCUGGGGGCCGCUUUG | 3452 | CAAAGCGGCCCCCAGGACC |
| siRNA 555 | 555 | GUCCUGGGGGCCGCUUUGG | 3453 | CCAAAGCGGCCCCCAGGAC |
| siRNA 556 | 556 | UCCUGGGGGCCGCUUUGGC | 3454 | GCCAAAGCGGCCCCCAGGA |
| siRNA 557 | 557 | CCUGGGGGCCGCUUUGGCC | 3455 | GGCCAAAGCGGCCCCCAGG |
| siRNA 558 | 558 | CUGGGGGCCGCUUUGGCCG | 3456 | CGGCCAAAGCGGCCCCCAG |
| siRNA 559 | 559 | UGGGGGCCGCUUUGGCCGG | 3457 | CCGGCCAAAGCGGCCCCCA |
| siRNA 560 | 560 | GGGGGCCGCUUUGGCCGGG | 3458 | CCCGGCCAAAGCGGCCCCC |
| siRNA 561 | 561 | GGGGCCGCUUUGGCCGGGU | 3459 | ACCCGGCCAAAGCGGCCCC |
| siRNA 562 | 562 | GGGCCGCUUUGGCCGGGUG | 3460 | CACCCGGCCAAAGCGGCCC |
| siRNA 563 | 563 | GGCCGCUUUGGCCGGGUGC | 3461 | GCACCCGGCCAAAGCGGCC |
| siRNA 564 | 564 | GCCGCUUUGGCCGGGUGCG | 3462 | CGCACCCGGCCAAAGCGGC |
| siRNA 565 | 565 | CCGCUUUGGCCGGGUGCGA | 3463 | UCGCACCCGGCCAAAGCGG |
| siRNA 566 | 566 | CGCUUUGGCCGGGUGCGAG | 3464 | CUCGCACCCGGCCAAAGCG |
| siRNA 567 | 567 | GCUUUGGCCGGGUGCGAGC | 3465 | GCUCGCACCCGGCCAAAGC |
| siRNA 568 | 568 | CUUUGGCCGGGUGCGAGCU | 3466 | AGCUCGCACCCGGCCAAAG |
| siRNA 569 | 569 | UUUGGCCGGGUGCGAGCUU | 3467 | AAGCUCGCACCCGGCCAAA |
| siRNA 570 | 570 | UUGGCCGGGUGCGAGCUUG | 3468 | CAAGCUCGCACCCGGCCAA |
| siRNA 571 | 571 | UGGCCGGGUGCGAGCUUGC | 3469 | GCAAGCUCGCACCCGGCCA |
| siRNA 572 | 572 | GGCCGGGUGCGAGCUUGCC | 3470 | GGCAAGCUCGCACCCGGCC |
| siRNA 573 | 573 | GCCGGGUGCGAGCUUGCCU | 3471 | AGGCAAGCUCGCACCCGGC |
| siRNA 574 | 574 | CCGGGUGCGAGCUUGCCUG | 3472 | CAGGCAAGCUCGCACCCGG |
| siRNA 575 | 575 | CGGGUGCGAGCUUGCCUGG | 3473 | CCAGGCAAGCUCGCACCCG |
| siRNA 576 | 576 | GGGUGCGAGCUUGCCUGGG | 3474 | CCCAGGCAAGCUCGCACCC |
| siRNA 577 | 577 | GGUGCGAGCUUGCCUGGGG | 3475 | CCCCAGGCAAGCUCGCACC |
| siRNA 578 | 578 | GUGCGAGCUUGCCUGGGGG | 3476 | CCCCCAGGCAAGCUCGCAC |
| siRNA 579 | 579 | UGCGAGCUUGCCUGGGGGG | 3477 | CCCCCCAGGCAAGCUCGCA |
| SIRNA 580 | 580 | GCGAGCUUGCCUGGGGGGU | 3478 | ACCCCCCAGGCAAGCUCGC |
| siRNA 581 | 581 | CGAGCUUGCCUGGGGGGUG | 3479 | CACCCCCCAGGCAAGCUCG |
| siRNA 582 | 582 | GAGCUUGCCUGGGGGGUGG | 3480 | CCACCCCCCAGGCAAGCUC |
| siRNA 583 | 583 | AGCUUGCCUGGGGGGUGGC | 3481 | GCCACCCCCCAGGCAAGCU |
| siRNA 584 | 584 | GCUUGCCUGGGGGGUGGCC | 3482 | GGCCACCCCCCAGGCAAGC |
| siRNA 585 | 585 | CUUGCCUGGGGGGUGGCCA | 3483 | UGGCCACCCCCCAGGCAAG |
| siRNA 586 | 586 | UUGCCUGGGGGGUGGCCAG | 3484 | CUGGCCACCCCCCAGGCAA |
| siRNA 587 | 587 | UGCCUGGGGGGUGGCCAGA | 3485 | UCUGGCCACCCCCCAGGCA |
| siRNA 588 | 588 | GCCUGGGGGGUGGCCAGAG | 3486 | CUCUGGCCACCCCCCAGGC |
| siRNA 589 | 589 | CCUGGGGGGUGGCCAGAGA | 3487 | UCUCUGGCCACCCCCCAGG |
| siRNA 590 | 590 | CUGGGGGGUGGCCAGAGAC | 3488 | GUCUCUGGCCACCCCCCAG |
| siRNA 591 | 591 | UGGGGGGUGGCCAGAGACA | 3489 | UGUCUCUGGCCACCCCCCA |
| siRNA 592 | 592 | GGGGGGUGGCCAGAGACAC | 3490 | GUGUCUCUGGCCACCCCCC |
| siRNA 593 | 593 | GGGGGUGGCCAGAGACACU | 3491 | AGUGUCUCUGGCCACCCCC |
| siRNA 594 | 594 | GGGGUGGCCAGAGACACUG | 3492 | CAGUGUCUCUGGCCACCCC |
| siRNA 595 | 595 | GGGUGGCCAGAGACACUGC | 3493 | GCAGUGUCUCUGGCCACCC |
| siRNA 596 | 596 | GGUGGCCAGAGACACUGCG | 3494 | CGCAGUGUCUCUGGCCACC |
| siRNA 597 | 597 | GUGGCCAGAGACACUGCGG | 3495 | CCGCAGUGUCUCUGGCCAC |
| siRNA 598 | 598 | UGGCCAGAGACACUGCGGA | 3496 | UCCGCAGUGUCUCUGGCCA |
| siRNA 599 | 599 | GGCCAGAGACACUGCGGAA | 3497 | UUCCGCAGUGUCUCUGGCC |
| siRNA 600 | 600 | GCCAGAGACACUGCGGAAU | 3498 | AUUCCGCAGUGUCUCUGGC |
| siRNA 601 | 601 | CCAGAGACACUGCGGAAUU | 3499 | AAUUCCGCAGUGUCUCUGG |
| siRNA 602 | 602 | CAGAGACACUGCGGAAUUU | 3500 | AAAUUCCGCAGUGUCUCUG |
| siRNA 603 | 603 | AGAGACACUGCGGAAUUUG | 3501 | CAAAUUCCGCAGUGUCUCU |
| siRNA 604 | 604 | GAGACACUGCGGAAUUUGC | 3502 | GCAAAUUCCGCAGUGUCUC |
| siRNA 605 | 605 | AGACACUGCGGAAUUUGCU | 3503 | AGCAAAUUCCGCAGUGUCU |
| siRNA 606 | 606 | GACACUGCGGAAUUUGCUG | 3504 | CAGCAAAUUCCGCAGUGUC |
| siRNA 607 | 607 | ACACUGCGGAAUUUGCUGC | 3505 | GCAGCAAAUUCCGCAGUGU |
| siRNA 608 | 608 | CACUGCGGAAUUUGCUGCC | 3506 | GGCAGCAAAUUCCGCAGUG |
| siRNA 609 | 609 | ACUGCGGAAUUUGCUGCCA | 3507 | UGGCAGCAAAUUCCGCAGU |
| siRNA 610 | 610 | CUGCGGAAUUUGCUGCCAA | 3508 | UUGGCAGCAAAUUCCGCAG |
| siRNA 611 | 611 | UGCGGAAUUUGCUGCCAAC | 3509 | GUUGGCAGCAAAUUCCGCA |
| siRNA 612 | 612 | GCGGAAUUUGCUGCCAACA | 3510 | UGUUGGCAGCAAAUUCCGC |
| siRNA 613 | 613 | CGGAAUUUGCUGCCAACAC | 3511 | GUGUUGGCAGCAAAUUCCG |
| siRNA 614 | 614 | GGAAUUUGCUGCCAACACU | 3512 | AGUGUUGGCAGCAAAUUCC |
| siRNA 615 | 615 | GAAUUUGCUGCCAACACUC | 3513 | GAGUGUUGGCAGCAAAUUC |
| siRNA 616 | 616 | AAUUUGCUGCCAACACUCG | 3514 | CGAGUGUUGGCAGCAAAUU |
| siRNA 617 | 617 | AUUUGCUGCCAACACUCGA | 3515 | UCGAGUGUUGGCAGCAAAU |
| siRNA 618 | 618 | UUUGCUGCCAACACUCGAG | 3516 | CUCGAGUGUUGGCAGCAAA |
| siRNA 619 | 619 | UUGCUGCCAACACUCGAGC | 3517 | GCUCGAGUGUUGGCAGCAA |
| siRNA 620 | 620 | UGCUGCCAACACUCGAGCU | 3518 | AGCUCGAGUGUUGGCAGCA |
| siRNA 621 | 621 | GCUGCCAACACUCGAGCUG | 3519 | CAGCUCGAGUGUUGGCAGC |
| siRNA 622 | 622 | CUGCCAACACUCGAGCUGG | 3520 | CCAGCUCGAGUGUUGGCAG |
| siRNA 623 | 623 | UGCCAACACUCGAGCUGGC | 3521 | GCCAGCUCGAGUGUUGGCA |
| siRNA 624 | 624 | GCCAACACUCGAGCUGGCC | 3522 | GGCCAGCUCGAGUGUUGGC |
| siRNA 625 | 625 | CCAACACUCGAGCUGGCCG | 3523 | CGGCCAGCUCGAGUGUUGG |
| siRNA 626 | 626 | CAACACUCGAGCUGGCCGA | 3524 | UCGGCCAGCUCGAGUGUUG |
| siRNA 627 | 627 | AACACUCGAGCUGGCCGAC | 3525 | GUCGGCCAGCUCGAGUGUU |
| siRNA 628 | 628 | ACACUCGAGCUGGCCGACU | 3526 | AGUCGGCCAGCUCGAGUGU |
| siRNA 629 | 629 | CACUCGAGCUGGCCGACUG | 3527 | CAGUCGGCCAGCUCGAGUG |
| siRNA 630 | 630 | ACUCGAGCUGGCCGACUGG | 3528 | CCAGUCGGCCAGCUCGAGU |
| siRNA 631 | 631 | CUCGAGCUGGCCGACUGGC | 3529 | GCCAGUCGGCCAGCUCGAG |
| siRNA 632 | 632 | UCGAGCUGGCCGACUGGCU | 3530 | AGCCAGUCGGCCAGCUCGA |
| siRNA 633 | 633 | CGAGCUGGCCGACUGGCUU | 3531 | AAGCCAGUCGGCCAGCUCG |
| siRNA 634 | 634 | GAGCUGGCCGACUGGCUUC | 3532 | GAAGCCAGUCGGCCAGCUC |
| siRNA 635 | 635 | AGCUGGCCGACUGGCUUCU | 3533 | AGAAGCCAGUCGGCCAGCU |
| siRNA 636 | 636 | GCUGGCCGACUGGCUUCUG | 3534 | CAGAAGCCAGUCGGCCAGC |
| siRNA 637 | 637 | CUGGCCGACUGGCUUCUGG | 3535 | CCAGAAGCCAGUCGGCCAG |
| siRNA 638 | 638 | UGGCCGACUGGCUUCUGGA | 3536 | UCCAGAAGCCAGUCGGCCA |
| SIRNA 639 | 639 | GGCCGACUGGCUUCUGGAG | 3537 | CUCCAGAAGCCAGUCGGCC |
| siRNA 640 | 640 | GCCGACUGGCUUCUGGAGG | 3538 | CCUCCAGAAGCCAGUCGGC |
| siRNA 641 | 641 | CCGACUGGCUUCUGGAGGG | 3539 | CCCUCCAGAAGCCAGUCGG |
| siRNA 642 | 642 | CGACUGGCUUCUGGAGGGG | 3540 | CCCCUCCAGAAGCCAGUCG |
| siRNA 643 | 643 | GACUGGCUUCUGGAGGGGC | 3541 | GCCCCUCCAGAAGCCAGUC |
| siRNA 644 | 644 | ACUGGCUUCUGGAGGGGCC | 3542 | GGCCCCUCCAGAAGCCAGU |
| siRNA 645 | 645 | CUGGCUUCUGGAGGGGCCG | 3543 | CGGCCCCUCCAGAAGCCAG |
| siRNA 646 | 646 | UGGCUUCUGGAGGGGCCGA | 3544 | UCGGCCCCUCCAGAAGCCA |
| siRNA 647 | 647 | GGCUUCUGGAGGGGCCGAC | 3545 | GUCGGCCCCUCCAGAAGCC |
| siRNA 648 | 648 | GCUUCUGGAGGGGCCGACU | 3546 | AGUCGGCCCCUCCAGAAGC |
| siRNA 649 | 649 | CUUCUGGAGGGGCCGACUU | 3547 | AAGUCGGCCCCUCCAGAAG |
| siRNA 650 | 650 | UUCUGGAGGGGCCGACUUG | 3548 | CAAGUCGGCCCCUCCAGAA |
| siRNA 651 | 651 | UCUGGAGGGGCCGACUUGG | 3549 | CCAAGUCGGCCCCUCCAGA |
| siRNA 652 | 652 | CUGGAGGGGCCGACUUGGC | 3550 | GCCAAGUCGGCCCCUCCAG |
| siRNA 653 | 653 | UGGAGGGGCCGACUUGGCC | 3551 | GGCCAAGUCGGCCCCUCCA |
| siRNA 654 | 654 | GGAGGGGCCGACUUGGCCU | 3552 | AGGCCAAGUCGGCCCCUCC |
| siRNA 655 | 655 | GAGGGGCCGACUUGGCCUU | 3553 | AAGGCCAAGUCGGCCCCUC |
| siRNA 656 | 656 | AGGGGCCGACUUGGCCUUG | 3554 | CAAGGCCAAGUCGGCCCCU |
| siRNA 657 | 657 | GGGGCCGACUUGGCCUUGG | 3555 | CCAAGGCCAAGUCGGCCCC |
| siRNA 658 | 658 | GGGCCGACUUGGCCUUGGG | 3556 | CCCAAGGCCAAGUCGGCCC |
| siRNA 659 | 659 | GGCCGACUUGGCCUUGGGC | 3557 | GCCCAAGGCCAAGUCGGCC |
| siRNA 660 | 660 | GCCGACUUGGCCUUGGGCA | 3558 | UGCCCAAGGCCAAGUCGGC |
| siRNA 661 | 661 | CCGACUUGGCCUUGGGCAG | 3559 | CUGCCCAAGGCCAAGUCGG |
| siRNA 662 | 662 | CGACUUGGCCUUGGGCAGC | 3560 | GCUGCCCAAGGCCAAGUCG |
| siRNA 663 | 663 | GACUUGGCCUUGGGCAGCA | 3561 | UGCUGCCCAAGGCCAAGUC |
| siRNA 664 | 664 | ACUUGGCCUUGGGCAGCAU | 3562 | AUGCUGCCCAAGGCCAAGU |
| siRNA 665 | 665 | CUUGGCCUUGGGCAGCAUU | 3563 | AAUGCUGCCCAAGGCCAAG |
| siRNA 666 | 666 | UUGGCCUUGGGCAGCAUUG | 3564 | CAAUGCUGCCCAAGGCCAA |
| siRNA 667 | 667 | UGGCCUUGGGCAGCAUUGA | 3565 | UCAAUGCUGCCCAAGGCCA |
| siRNA 668 | 668 | GGCCUUGGGCAGCAUUGAG | 3566 | CUCAAUGCUGCCCAAGGCC |
| siRNA 669 | 669 | GCCUUGGGCAGCAUUGAGA | 3567 | UCUCAAUGCUGCCCAAGGC |
| siRNA 670 | 670 | CCUUGGGCAGCAUUGAGAA | 3568 | UUCUCAAUGCUGCCCAAGG |
| siRNA 671 | 671 | CUUGGGCAGCAUUGAGAAG | 3569 | CUUCUCAAUGCUGCCCAAG |
| siRNA 672 | 672 | UUGGGCAGCAUUGAGAAGG | 3570 | CCUUCUCAAUGCUGCCCAA |
| siRNA 673 | 673 | UGGGCAGCAUUGAGAAGGU | 3571 | ACCUUCUCAAUGCUGCCCA |
| siRNA 674 | 674 | GGGCAGCAUUGAGAAGGUG | 3572 | CACCUUCUCAAUGCUGCCC |
| siRNA 675 | 675 | GGCAGCAUUGAGAAGGUGG | 3573 | CCACCUUCUCAAUGCUGCC |
| siRNA 676 | 676 | GCAGCAUUGAGAAGGUGGU | 3574 | ACCACCUUCUCAAUGCUGC |
| siRNA 677 | 677 | CAGCAUUGAGAAGGUGGUG | 3575 | CACCACCUUCUCAAUGCUG |
| siRNA 678 | 678 | AGCAUUGAGAAGGUGGUGG | 3576 | CCACCACCUUCUCAAUGCU |
| siRNA 679 | 679 | GCAUUGAGAAGGUGGUGGA | 3577 | UCCACCACCUUCUCAAUGC |
| siRNA 680 | 680 | CAUUGAGAAGGUGGUGGAG | 3578 | CUCCACCACCUUCUCAAUG |
| siRNA 681 | 681 | AUUGAGAAGGUGGUGGAGU | 3579 | ACUCCACCACCUUCUCAAU |
| siRNA 682 | 682 | UUGAGAAGGUGGUGGAGUA | 3580 | UACUCCACCACCUUCUCAA |
| siRNA 683 | 683 | UGAGAAGGUGGUGGAGUAC | 3581 | GUACUCCACCACCUUCUCA |
| siRNA 684 | 684 | GAGAAGGUGGUGGAGUACC | 3582 | GGUACUCCACCACCUUCUC |
| siRNA 685 | 685 | AGAAGGUGGUGGAGUACCU | 3583 | AGGUACUCCACCACCUUCU |
| siRNA 686 | 686 | GAAGGUGGUGGAGUACCUC | 3584 | GAGGUACUCCACCACCUUC |
| siRNA 687 | 687 | AAGGUGGUGGAGUACCUCC | 3585 | GGAGGUACUCCACCACCUU |
| siRNA 688 | 688 | AGGUGGUGGAGUACCUCCU | 3586 | AGGAGGUACUCCACCACCU |
| siRNA 689 | 689 | GGUGGUGGAGUACCUCCUC | 3587 | GAGGAGGUACUCCACCACC |
| siRNA 690 | 690 | GUGGUGGAGUACCUCCUCC | 3588 | GGAGGAGGUACUCCACCAC |
| siRNA 691 | 691 | UGGUGGAGUACCUCCUCCC | 3589 | GGGAGGAGGUACUCCACCA |
| siRNA 692 | 692 | GGUGGAGUACCUCCUCCCU | 3590 | AGGGAGGAGGUACUCCACC |
| siRNA 693 | 693 | GUGGAGUACCUCCUCCCUC | 3591 | GAGGGAGGAGGUACUCCAC |
| siRNA 694 | 694 | UGGAGUACCUCCUCCCUCC | 3592 | GGAGGGAGGAGGUACUCCA |
| siRNA 695 | 695 | GGAGUACCUCCUCCCUCCA | 3593 | UGGAGGGAGGAGGUACUCC |
| siRNA 696 | 696 | GAGUACCUCCUCCCUCCAG | 3594 | CUGGAGGGAGGAGGUACUC |
| siRNA 697 | 697 | AGUACCUCCUCCCUCCAGA | 3595 | UCUGGAGGGAGGAGGUACU |
| siRNA 698 | 698 | GUACCUCCUCCCUCCAGAC | 3596 | GUCUGGAGGGAGGAGGUAC |
| siRNA 699 | 699 | UACCUCCUCCCUCCAGACA | 3597 | UGUCUGGAGGGAGGAGGUA |
| siRNA 700 | 700 | ACCUCCUCCCUCCAGACAA | 3598 | UUGUCUGGAGGGAGGAGGU |
| siRNA 701 | 701 | CCUCCUCCCUCCAGACAAG | 3599 | CUUGUCUGGAGGGAGGAGG |
| siRNA 702 | 702 | CUCCUCCCUCCAGACAAGG | 3600 | CCUUGUCUGGAGGGAGGAG |
| siRNA 703 | 703 | UCCUCCCUCCAGACAAGGA | 3601 | UCCUUGUCUGGAGGGAGGA |
| siRNA 704 | 704 | CCUCCCUCCAGACAAGGAA | 3602 | UUCCUUGUCUGGAGGGAGG |
| siRNA 705 | 705 | CUCCCUCCAGACAAGGAAG | 3603 | CUUCCUUGUCUGGAGGGAG |
| siRNA 706 | 706 | UCCCUCCAGACAAGGAAGA | 3604 | UCUUCCUUGUCUGGAGGGA |
| siRNA 707 | 707 | CCCUCCAGACAAGGAAGAG | 3605 | CUCUUCCUUGUCUGGAGGG |
| siRNA 708 | 708 | CCUCCAGACAAGGAAGAGU | 3606 | ACUCUUCCUUGUCUGGAGG |
| siRNA 709 | 709 | CUCCAGACAAGGAAGAGUC | 3607 | GACUCUUCCUUGUCUGGAG |
| siRNA 710 | 710 | UCCAGACAAGGAAGAGUCA | 3608 | UGACUCUUCCUUGUCUGGA |
| siRNA 711 | 711 | CCAGACAAGGAAGAGUCAG | 3609 | CUGACUCUUCCUUGUCUGG |
| siRNA 712 | 712 | CAGACAAGGAAGAGUCAGC | 3610 | GCUGACUCUUCCUUGUCUG |
| siRNA 713 | 713 | AGACAAGGAAGAGUCAGCC | 3611 | GGCUGACUCUUCCUUGUCU |
| siRNA 714 | 714 | GACAAGGAAGAGUCAGCCC | 3612 | GGGCUGACUCUUCCUUGUC |
| siRNA 715 | 715 | ACAAGGAAGAGUCAGCCCC | 3613 | GGGGCUGACUCUUCCUUGU |
| siRNA 716 | 716 | CAAGGAAGAGUCAGCCCCU | 3614 | AGGGGCUGACUCUUCCUUG |
| siRNA 717 | 717 | AAGGAAGAGUCAGCCCCUG | 3615 | CAGGGGCUGACUCUUCCUU |
| siRNA 718 | 718 | AGGAAGAGUCAGCCCCUGC | 3616 | GCAGGGGCUGACUCUUCCU |
| siRNA 719 | 719 | GGAAGAGUCAGCCCCUGCU | 3617 | AGCAGGGGCUGACUCUUCC |
| siRNA 720 | 720 | GAAGAGUCAGCCCCUGCUC | 3618 | GAGCAGGGGCUGACUCUUC |
| siRNA 721 | 721 | AAGAGUCAGCCCCUGCUCC | 3619 | GGAGCAGGGGCUGACUCUU |
| siRNA 722 | 722 | AGAGUCAGCCCCUGCUCCU | 3620 | AGGAGCAGGGGCUGACUCU |
| siRNA 723 | 723 | GAGUCAGCCCCUGCUCCUG | 3621 | CAGGAGCAGGGGCUGACUC |
| siRNA 724 | 724 | AGUCAGCCCCUGCUCCUGG | 3622 | CCAGGAGCAGGGGCUGACU |
| siRNA 725 | 725 | GUCAGCCCCUGCUCCUGGA | 3623 | UCCAGGAGCAGGGGCUGAC |
| siRNA 726 | 726 | UCAGCCCCUGCUCCUGGAC | 3624 | GUCCAGGAGCAGGGGCUGA |
| siRNA 727 | 727 | CAGCCCCUGCUCCUGGACA | 3625 | UGUCCAGGAGCAGGGGCUG |
| siRNA 728 | 728 | AGCCCCUGCUCCUGGACAC | 3626 | GUGUCCAGGAGCAGGGGCU |
| siRNA 729 | 729 | GCCCCUGCUCCUGGACACC | 3627 | GGUGUCCAGGAGCAGGGGC |
| siRNA 730 | 730 | CCCCUGCUCCUGGACACCA | 3628 | UGGUGUCCAGGAGCAGGGG |
| siRNA 731 | 731 | CCCUGCUCCUGGACACCAG | 3629 | CUGGUGUCCAGGAGCAGGG |
| siRNA 732 | 732 | CCUGCUCCUGGACACCAGC | 3630 | GCUGGUGUCCAGGAGCAGG |
| siRNA 733 | 733 | CUGCUCCUGGACACCAGCA | 3631 | UGCUGGUGUCCAGGAGCAG |
| siRNA 734 | 734 | UGCUCCUGGACACCAGCAA | 3632 | UUGCUGGUGUCCAGGAGCA |
| siRNA 735 | 735 | GCUCCUGGACACCAGCAAG | 3633 | CUUGCUGGUGUCCAGGAGC |
| siRNA 736 | 736 | CUCCUGGACACCAGCAAGC | 3634 | GCUUGCUGGUGUCCAGGAG |
| siRNA 737 | 737 | UCCUGGACACCAGCAAGCC | 3635 | GGCUUGCUGGUGUCCAGGA |
| siRNA 738 | 738 | CCUGGACACCAGCAAGCCC | 3636 | GGGCUUGCUGGUGUCCAGG |
| siRNA 739 | 739 | CUGGACACCAGCAAGCCCA | 3637 | UGGGCUUGCUGGUGUCCAG |
| siRNA 740 | 740 | UGGACACCAGCAAGCCCAG | 3638 | CUGGGCUUGCUGGUGUCCA |
| siRNA 741 | 741 | GGACACCAGCAAGCCCAGA | 3639 | UCUGGGCUUGCUGGUGUCC |
| siRNA 742 | 142 | GACACCAGCAAGCCCAGAA | 3640 | UUCUGGGCUUGCUGGUGUC |
| siRNA 743 | 743 | ACACCAGCAAGCCCAGAAG | 3641 | CUUCUGGGCUUGCUGGUGU |
| siRNA 744 | 744 | CACCAGCAAGCCCAGAAGU | 3642 | ACUUCUGGGCUUGCUGGUG |
| siRNA 745 | 745 | ACCAGCAAGCCCAGAAGUC | 3643 | GACUUCUGGGCUUGCUGGU |
| siRNA 746 | 746 | CCAGCAAGCCCAGAAGUCU | 3644 | AGACUUCUGGGCUUGCUGG |
| siRNA 747 | 747 | CAGCAAGCCCAGAAGUCUC | 3645 | GAGACUUCUGGGCUUGCUG |
| siRNA 748 | 748 | AGCAAGCCCAGAAGUCUCC | 3646 | GGAGACUUCUGGGCUUGCU |
| siRNA 749 | 749 | GCAAGCCCAGAAGUCUCCC | 3647 | GGGAGACUUCUGGGCUUGC |
| siRNA 750 | 750 | CAAGCCCAGAAGUCUCCCA | 3648 | UGGGAGACUUCUGGGCUUG |
| siRNA 751 | 751 | AAGCCCAGAAGUCUCCCAA | 3649 | UUGGGAGACUUCUGGGCUU |
| siRNA 752 | 752 | AGCCCAGAAGUCUCCCAAG | 3650 | CUUGGGAGACUUCUGGGCU |
| siRNA 753 | 753 | GCCCAGAAGUCUCCCAAGG | 3651 | CCUUGGGAGACUUCUGGGC |
| siRNA 754 | 754 | CCCAGAAGUCUCCCAAGGC | 3652 | GCCUUGGGAGACUUCUGGG |
| siRNA 755 | 755 | CCAGAAGUCUCCCAAGGCC | 3653 | GGCCUUGGGAGACUUCUGG |
| siRNA 756 | 756 | CAGAAGUCUCCCAAGGCCA | 3654 | UGGCCUUGGGAGACUUCUG |
| siRNA 757 | 757 | AGAAGUCUCCCAAGGCCAA | 3655 | UUGGCCUUGGGAGACUUCU |
| siRNA 758 | 758 | GAAGUCUCCCAAGGCCAAG | 3656 | CUUGGCCUUGGGAGACUUC |
| siRNA 759 | 759 | AAGUCUCCCAAGGCCAAGC | 3657 | GCUUGGCCUUGGGAGACUU |
| siRNA 760 | 760 | AGUCUCCCAAGGCCAAGCC | 3658 | GGCUUGGCCUUGGGAGACU |
| siRNA 761 | 761 | GUCUCCCAAGGCCAAGCCA | 3659 | UGGCUUGGCCUUGGGAGAC |
| siRNA 762 | 762 | UCUCCCAAGGCCAAGCCAA | 3660 | UUGGCUUGGCCUUGGGAGA |
| siRNA 763 | 763 | CUCCCAAGGCCAAGCCAAG | 3661 | CUUGGCUUGGCCUUGGGAG |
| siRNA 764 | 764 | UCCCAAGGCCAAGCCAAGC | 3662 | GCUUGGCUUGGCCUUGGGA |
| siRNA 765 | 765 | CCCAAGGCCAAGCCAAGCC | 3663 | GGCUUGGCUUGGCCUUGGG |
| siRNA 766 | 766 | CCAAGGCCAAGCCAAGCCU | 3664 | AGGCUUGGCUUGGCCUUGG |
| siRNA 767 | 767 | CAAGGCCAAGCCAAGCCUC | 3665 | GAGGCUUGGCUUGGCCUUG |
| siRNA 768 | 768 | AAGGCCAAGCCAAGCCUCU | 3666 | AGAGGCUUGGCUUGGCCUU |
| siRNA 769 | 769 | AGGCCAAGCCAAGCCUCUU | 3667 | AAGAGGCUUGGCUUGGCCU |
| siRNA 770 | 770 | GGCCAAGCCAAGCCUCUUG | 3668 | CAAGAGGCUUGGCUUGGCC |
| siRNA 771 | 771 | GCCAAGCCAAGCCUCUUGA | 3669 | UCAAGAGGCUUGGCUUGGC |
| siRNA 772 | 772 | CCAAGCCAAGCCUCUUGAG | 3670 | CUCAAGAGGCUUGGCUUGG |
| siRNA 773 | 773 | CAAGCCAAGCCUCUUGAGC | 3671 | GCUCAAGAGGCUUGGCUUG |
| siRNA 774 | 774 | AAGCCAAGCCUCUUGAGCA | 3672 | UGCUCAAGAGGCUUGGCUU |
| siRNA 775 | 775 | AGCCAAGCCUCUUGAGCAG | 3673 | CUGCUCAAGAGGCUUGGCU |
| siRNA 776 | 776 | GCCAAGCCUCUUGAGCAGG | 3674 | CCUGCUCAAGAGGCUUGGC |
| siRNA 777 | 777 | CCAAGCCUCUUGAGCAGGG | 3675 | CCCUGCUCAAGAGGCUUGG |
| siRNA 778 | 778 | CAAGCCUCUUGAGCAGGGU | 3676 | ACCCUGCUCAAGAGGCUUG |
| siRNA 779 | 779 | AAGCCUCUUGAGCAGGGUU | 3677 | AACCCUGCUCAAGAGGCUU |
| siRNA 780 | 780 | AGCCUCUUGAGCAGGGUUG | 3678 | CAACCCUGCUCAAGAGGCU |
| siRNA 781 | 781 | GCCUCUUGAGCAGGGUUGG | 3679 | CCAACCCUGCUCAAGAGGC |
| siRNA 782 | 782 | CCUCUUGAGCAGGGUUGGG | 3680 | CCCAACCCUGCUCAAGAGG |
| siRNA 783 | 783 | CUCUUGAGCAGGGUUGGGG | 3681 | CCCCAACCCUGCUCAAGAG |
| siRNA 784 | 784 | UCUUGAGCAGGGUUGGGGC | 3682 | GCCCCAACCCUGCUCAAGA |
| siRNA 785 | 785 | CUUGAGCAGGGUUGGGGCU | 3683 | AGCCCCAACCCUGCUCAAG |
| siRNA 786 | 786 | UUGAGCAGGGUUGGGGCUC | 3684 | GAGCCCCAACCCUGCUCAA |
| siRNA 787 | 787 | UGAGCAGGGUUGGGGCUCU | 3685 | AGAGCCCCAACCCUGCUCA |
| siRNA 788 | 788 | GAGCAGGGUUGGGGCUCUG | 3686 | CAGAGCCCCAACCCUGCUC |
| siRNA 789 | 789 | AGCAGGGUUGGGGCUCUGA | 3687 | UCAGAGCCCCAACCCUGCU |
| siRNA 790 | 790 | GCAGGGUUGGGGCUCUGAC | 3688 | GUCAGAGCCCCAACCCUGC |
| siRNA 791 | 791 | CAGGGUUGGGGCUCUGACC | 3689 | GGUCAGAGCCCCAACCCUG |
| siRNA 792 | 792 | AGGGUUGGGGCUCUGACCA | 3690 | UGGUCAGAGCCCCAACCCU |
| siRNA 793 | 793 | GGGUUGGGGCUCUGACCAA | 3691 | UUGGUCAGAGCCCCAACCC |
| siRNA 794 | 794 | GGUUGGGGCUCUGACCAAC | 3692 | GUUGGUCAGAGCCCCAACC |
| siRNA 795 | 795 | GUUGGGGCUCUGACCAACA | 3693 | UGUUGGUCAGAGCCCCAAC |
| siRNA 796 | 796 | UUGGGGCUCUGACCAACAC | 3694 | GUGUUGGUCAGAGCCCCAA |
| siRNA 797 | 797 | UGGGGCUCUGACCAACACC | 3695 | GGUGUUGGUCAGAGCCCCA |
| siRNA 798 | 798 | GGGGCUCUGACCAACACCC | 3696 | GGGUGUUGGUCAGAGCCCC |
| siRNA 799 | 799 | GGGCUCUGACCAACACCCU | 3697 | AGGGUGUUGGUCAGAGCCC |
| siRNA 800 | 800 | GGCUCUGACCAACACCCUC | 3698 | GAGGGUGUUGGUCAGAGCC |
| siRNA 801 | 801 | GCUCUGACCAACACCCUCU | 3699 | AGAGGGUGUUGGUCAGAGC |
| siRNA 802 | 802 | CUCUGACCAACACCCUCUC | 3700 | GAGAGGGUGUUGGUCAGAG |
| siRNA 803 | 803 | UCUGACCAACACCCUCUCU | 3701 | AGAGAGGGUGUUGGUCAGA |
| siRNA 804 | 804 | CUGACCAACACCCUCUCUC | 3702 | GAGAGAGGGUGUUGGUCAG |
| siRNA 805 | 805 | UGACCAACACCCUCUCUCG | 3703 | CGAGAGAGGGUGUUGGUCA |
| siRNA 806 | 806 | GACCAACACCCUCUCUCGA | 3704 | UCGAGAGAGGGUGUUGGUC |
| siRNA 807 | 807 | ACCAACACCCUCUCUCGAU | 3705 | AUCGAGAGAGGGUGUUGGU |
| siRNA 808 | 808 | CCAACACCCUCUCUCGAUA | 3706 | UAUCGAGAGAGGGUGUUGG |
| siRNA 809 | 809 | CAACACCCUCUCUCGAUAC | 3707 | GUAUCGAGAGAGGGUGUUG |
| siRNA 810 | 810 | AACACCCUCUCUCGAUACA | 3708 | UGUAUCGAGAGAGGGUGUU |
| siRNA 811 | 811 | ACACCCUCUCUCGAUACAC | 3709 | GUGUAUCGAGAGAGGGUGU |
| siRNA 812 | 812 | CACCCUCUCUCGAUACACC | 3710 | GGUGUAUCGAGAGAGGGUG |
| siRNA 813 | 813 | ACCCUCUCUCGAUACACCG | 3711 | CGGUGUAUCGAGAGAGGGU |
| siRNA 814 | 814 | CCCUCUCUCGAUACACCGU | 3712 | ACGGUGUAUCGAGAGAGGG |
| siRNA 815 | 815 | CCUCUCUCGAUACACCGUG | 3713 | CACGGUGUAUCGAGAGAGG |
| siRNA 816 | 816 | CUCUCUCGAUACACCGUGC | 3714 | GCACGGUGUAUCGAGAGAG |
| siRNA 817 | 817 | UCUCUCGAUACACCGUGCA | 3715 | UGCACGGUGUAUCGAGAGA |
| siRNA 818 | 818 | CUCUCGAUACACCGUGCAG | 3716 | CUGCACGGUGUAUCGAGAG |
| siRNA 819 | 819 | UCUCGAUACACCGUGCAGA | 3717 | UCUGCACGGUGUAUCGAGA |
| siRNA 820 | 820 | CUCGAUACACCGUGCAGAC | 3718 | GUCUGCACGGUGUAUCGAG |
| siRNA 821 | 821 | UCGAUACACCGUGCAGACC | 3719 | GGUCUGCACGGUGUAUCGA |
| siRNA 822 | 822 | CGAUACACCGUGCAGACCA | 3720 | UGGUCUGCACGGUGUAUCG |
| siRNA 823 | 823 | GAUACACCGUGCAGACCAU | 3721 | AUGGUCUGCACGGUGUAUC |
| siRNA 824 | 824 | AUACACCGUGCAGACCAUG | 3722 | CAUGGUCUGCACGGUGUAU |
| siRNA 825 | 825 | UACACCGUGCAGACCAUGG | 3723 | CCAUGGUCUGCACGGUGUA |
| siRNA 826 | 826 | ACACCGUGCAGACCAUGGC | 3724 | GCCAUGGUCUGCACGGUGU |
| siRNA 827 | 827 | CACCGUGCAGACCAUGGCC | 3725 | GGCCAUGGUCUGCACGGUG |
| siRNA 828 | 828 | ACCGUGCAGACCAUGGCCC | 3726 | GGGCCAUGGUCUGCACGGU |
| siRNA 829 | 829 | CCGUGCAGACCAUGGCCCG | 3727 | CGGGCCAUGGUCUGCACGG |
| siRNA 830 | 830 | CGUGCAGACCAUGGCCCGG | 3728 | CCGGGCCAUGGUCUGCACG |
| siRNA 831 | 831 | GUGCAGACCAUGGCCCGGG | 3729 | CCCGGGCCAUGGUCUGCAC |
| siRNA 832 | 832 | UGCAGACCAUGGCCCGGGC | 3730 | GCCCGGGCCAUGGUCUGCA |
| siRNA 833 | 833 | GCAGACCAUGGCCCGGGCC | 3731 | GGCCCGGGCCAUGGUCUGC |
| siRNA 834 | 834 | CAGACCAUGGCCCGGGCCC | 3732 | GGGCCCGGGCCAUGGUCUG |
| siRNA 835 | 835 | AGACCAUGGCCCGGGCCCU | 3733 | AGGGCCCGGGCCAUGGUCU |
| siRNA 836 | 836 | GACCAUGGCCCGGGCCCUG | 3734 | CAGGGCCCGGGCCAUGGUC |
| siRNA 837 | 837 | ACCAUGGCCCGGGCCCUGG | 3735 | CCAGGGCCCGGGCCAUGGU |
| siRNA 838 | 838 | CCAUGGCCCGGGCCCUGGA | 3736 | UCCAGGGCCCGGGCCAUGG |
| siRNA 839 | 839 | CAUGGCCCGGGCCCUGGAG | 3737 | CUCCAGGGCCCGGGCCAUG |
| siRNA 840 | 840 | AUGGCCCGGGCCCUGGAGC | 3738 | GCUCCAGGGCCCGGGCCAU |
| siRNA 841 | 841 | UGGCCCGGGCCCUGGAGCA | 3739 | UGCUCCAGGGCCCGGGCCA |
| siRNA 842 | 842 | GGCCCGGGCCCUGGAGCAG | 3740 | CUGCUCCAGGGCCCGGGCC |
| siRNA 843 | 843 | GCCCGGGCCCUGGAGCAGG | 3741 | CCUGCUCCAGGGCCCGGGC |
| siRNA 844 | 844 | CCCGGGCCCUGGAGCAGGG | 3742 | CCCUGCUCCAGGGCCCGGG |
| siRNA 845 | 845 | CCGGGCCCUGGAGCAGGGC | 3743 | GCCCUGCUCCAGGGCCCGG |
| siRNA 846 | 846 | CGGGCCCUGGAGCAGGGCC | 3744 | GGCCCUGCUCCAGGGCCCG |
| siRNA 847 | 847 | GGGCCCUGGAGCAGGGCCA | 3745 | UGGCCCUGCUCCAGGGCCC |
| siRNA 848 | 848 | GGCCCUGGAGCAGGGCCAC | 3746 | GUGGCCCUGCUCCAGGGCC |
| siRNA 849 | 849 | GCCCUGGAGCAGGGCCACA | 3747 | UGUGGCCCUGCUCCAGGGC |
| siRNA 850 | 850 | CCCUGGAGCAGGGCCACAC | 3748 | GUGUGGCCCUGCUCCAGGG |
| siRNA 851 | 851 | CCUGGAGCAGGGCCACACC | 3749 | GGUGUGGCCCUGCUCCAGG |
| siRNA 852 | 852 | CUGGAGCAGGGCCACACCG | 3750 | CGGUGUGGCCCUGCUCCAG |
| siRNA 853 | 853 | UGGAGCAGGGCCACACCGU | 3751 | ACGGUGUGGCCCUGCUCCA |
| siRNA 854 | 854 | GGAGCAGGGCCACACCGUG | 3752 | CACGGUGUGGCCCUGCUCC |
| siRNA 855 | 855 | GAGCAGGGCCACACCGUGG | 3753 | CCACGGUGUGGCCCUGCUC |
| siRNA 856 | 856 | AGCAGGGCCACACCGUGGC | 3754 | GCCACGGUGUGGCCCUGCU |
| siRNA 857 | 857 | GCAGGGCCACACCGUGGCC | 3755 | GGCCACGGUGUGGCCCUGC |
| siRNA 858 | 858 | CAGGGCCACACCGUGGCCA | 3756 | UGGCCACGGUGUGGCCCUG |
| siRNA 859 | 859 | AGGGCCACACCGUGGCCAU | 3757 | AUGGCCACGGUGUGGCCCU |
| siRNA 860 | 860 | GGGCCACACCGUGGCCAUG | 3758 | CAUGGCCACGGUGUGGCCC |
| siRNA 861 | 861 | GGCCACACCGUGGCCAUGU | 3759 | ACAUGGCCACGGUGUGGCC |
| siRNA 862 | 862 | GCCACACCGUGGCCAUGUG | 3760 | CACAUGGCCACGGUGUGGC |
| siRNA 863 | 863 | CCACACCGUGGCCAUGUGG | 3761 | CCACAUGGCCACGGUGUGG |
| siRNA 864 | 864 | CACACCGUGGCCAUGUGGA | 3762 | UCCACAUGGCCACGGUGUG |
| siRNA 865 | 865 | ACACCGUGGCCAUGUGGAU | 3763 | AUCCACAUGGCCACGGUGU |
| siRNA 866 | 866 | CACCGUGGCCAUGUGGAUC | 3764 | GAUCCACAUGGCCACGGUG |
| siRNA 867 | 867 | ACCGUGGCCAUGUGGAUCC | 3765 | GGAUCCACAUGGCCACGGU |
| siRNA 868 | 868 | CCGUGGCCAUGUGGAUCCC | 3766 | GGGAUCCACAUGGCCACGG |
| siRNA 869 | 869 | CGUGGCCAUGUGGAUCCCA | 3767 | UGGGAUCCACAUGGCCACG |
| siRNA 870 | 870 | GUGGCCAUGUGGAUCCCAG | 3768 | CUGGGAUCCACAUGGCCAC |
| siRNA 871 | 871 | UGGCCAUGUGGAUCCCAGG | 3769 | CCUGGGAUCCACAUGGCCA |
| siRNA 872 | 872 | GGCCAUGUGGAUCCCAGGC | 3770 | GCCUGGGAUCCACAUGGCC |
| siRNA 873 | 873 | GCCAUGUGGAUCCCAGGCG | 3771 | CGCCUGGGAUCCACAUGGC |
| siRNA 874 | 874 | CCAUGUGGAUCCCAGGCGU | 3772 | ACGCCUGGGAUCCACAUGG |
| siRNA 875 | 875 | CAUGUGGAUCCCAGGCGUG | 3773 | CACGCCUGGGAUCCACAUG |
| siRNA 876 | 876 | AUGUGGAUCCCAGGCGUGG | 3774 | CCACGCCUGGGAUCCACAU |
| siRNA 877 | 877 | UGUGGAUCCCAGGCGUGGU | 3775 | ACCACGCCUGGGAUCCACA |
| siRNA 878 | 878 | GUGGAUCCCAGGCGUGGUG | 3776 | CACCACGCCUGGGAUCCAC |
| siRNA 879 | 879 | UGGAUCCCAGGCGUGGUGC | 3777 | GCACCACGCCUGGGAUCCA |
| siRNA 880 | 880 | GGAUCCCAGGCGUGGUGCC | 3778 | GGCACCACGCCUGGGAUCC |
| siRNA 881 | 881 | GAUCCCAGGCGUGGUGCCC | 3779 | GGGCACCACGCCUGGGAUC |
| siRNA 882 | 882 | AUCCCAGGCGUGGUGCCCC | 3780 | GGGGCACCACGCCUGGGAU |
| siRNA 883 | 883 | UCCCAGGCGUGGUGCCCCU | 3781 | AGGGGCACCACGCCUGGGA |
| siRNA 884 | 884 | CCCAGGCGUGGUGCCCCUG | 3782 | CAGGGGCACCACGCCUGGG |
| siRNA 885 | 885 | CCAGGCGUGGUGCCCCUGA | 3783 | UCAGGGGCACCACGCCUGG |
| siRNA 886 | 886 | CAGGCGUGGUGCCCCUGAG | 3784 | CUCAGGGGCACCACGCCUG |
| siRNA 887 | 887 | AGGCGUGGUGCCCCUGAGC | 3785 | GCUCAGGGGCACCACGCCU |
| siRNA 888 | 888 | GGCGUGGUGCCCCUGAGCA | 3786 | UGCUCAGGGGCACCACGCC |
| siRNA 889 | 889 | GCGUGGUGCCCCUGAGCAG | 3787 | CUGCUCAGGGGCACCACGC |
| siRNA 890 | 890 | CGUGGUGCCCCUGAGCAGC | 3788 | GCUGCUCAGGGGCACCACG |
| siRNA 891 | 891 | GUGGUGCCCCUGAGCAGCC | 3789 | GGCUGCUCAGGGGCACCAC |
| siRNA 892 | 892 | UGGUGCCCCUGAGCAGCCU | 3790 | AGGCUGCUCAGGGGCACCA |
| siRNA 893 | 893 | GGUGCCCCUGAGCAGCCUG | 3791 | CAGGCUGCUCAGGGGCACC |
| siRNA 894 | 894 | GUGCCCCUGAGCAGCCUGG | 3792 | CCAGGCUGCUCAGGGGCAC |
| siRNA 895 | 895 | UGCCCCUGAGCAGCCUGGC | 3793 | GCCAGGCUGCUCAGGGGCA |
| siRNA 896 | 896 | GCCCCUGAGCAGCCUGGCC | 3794 | GGCCAGGCUGCUCAGGGGC |
| siRNA 897 | 897 | CCCCUGAGCAGCCUGGCCC | 3795 | GGGCCAGGCUGCUCAGGGG |
| siRNA 898 | 898 | CCCUGAGCAGCCUGGCCCA | 3796 | UGGGCCAGGCUGCUCAGGG |
| siRNA 899 | 899 | CCUGAGCAGCCUGGCCCAG | 3797 | CUGGGCCAGGCUGCUCAGG |
| siRNA 900 | 900 | CUGAGCAGCCUGGCCCAGU | 3798 | ACUGGGCCAGGCUGCUCAG |
| siRNA 901 | 901 | UGAGCAGCCUGGCCCAGUG | 3799 | CACUGGGCCAGGCUGCUCA |
| siRNA 902 | 902 | GAGCAGCCUGGCCCAGUGG | 3800 | CCACUGGGCCAGGCUGCUC |
| siRNA 903 | 903 | AGCAGCCUGGCCCAGUGGG | 3801 | CCCACUGGGCCAGGCUGCU |
| siRNA 904 | 904 | GCAGCCUGGCCCAGUGGGG | 3802 | CCCCACUGGGCCAGGCUGC |
| siRNA 905 | 905 | CAGCCUGGCCCAGUGGGGU | 3803 | ACCCCACUGGGCCAGGCUG |
| siRNA 906 | 906 | AGCCUGGCCCAGUGGGGUG | 3804 | CACCCCACUGGGCCAGGCU |
| siRNA 907 | 907 | GCCUGGCCCAGUGGGGUGC | 3805 | GCACCCCACUGGGCCAGGC |
| siRNA 908 | 908 | CCUGGCCCAGUGGGGUGCC | 3806 | GGCACCCCACUGGGCCAGG |
| siRNA 909 | 909 | CUGGCCCAGUGGGGUGCCU | 3807 | AGGCACCCCACUGGGCCAG |
| siRNA 910 | 910 | UGGCCCAGUGGGGUGCCUC | 3808 | GAGGCACCCCACUGGGCCA |
| siRNA 911 | 911 | GGCCCAGUGGGGUGCCUCA | 3809 | UGAGGCACCCCACUGGGCC |
| siRNA 912 | 912 | GCCCAGUGGGGUGCCUCAG | 3810 | CUGAGGCACCCCACUGGGC |
| siRNA 913 | 913 | CCCAGUGGGGUGCCUCAGU | 3811 | ACUGAGGCACCCCACUGGG |
| siRNA 914 | 914 | CCAGUGGGGUGCCUCAGUG | 3812 | CACUGAGGCACCCCACUGG |
| siRNA 915 | 915 | CAGUGGGGUGCCUCAGUGG | 3813 | CCACUGAGGCACCCCACUG |
| siRNA 916 | 916 | AGUGGGGUGCCUCAGUGGC | 3814 | GCCACUGAGGCACCCCACU |
| siRNA 917 | 917 | GUGGGGUGCCUCAGUGGCC | 3815 | GGCCACUGAGGCACCCCAC |
| siRNA 918 | 918 | UGGGGUGCCUCAGUGGCCA | 3816 | UGGCCACUGAGGCACCCCA |
| SIRNA 919 | 919 | GGGGUGCCUCAGUGGCCAU | 3817 | AUGGCCACUGAGGCACCCC |
| siRNA 920 | 920 | GGGUGCCUCAGUGGCCAUG | 3818 | CAUGGCCACUGAGGCACCC |
| siRNA 921 | 921 | GGUGCCUCAGUGGCCAUGC | 3819 | GCAUGGCCACUGAGGCACC |
| siRNA 922 | 922 | GUGCCUCAGUGGCCAUGCA | 3820 | UGCAUGGCCACUGAGGCAC |
| siRNA 923 | 923 | UGCCUCAGUGGCCAUGCAG | 3821 | CUGCAUGGCCACUGAGGCA |
| siRNA 924 | 924 | GCCUCAGUGGCCAUGCAGG | 3822 | CCUGCAUGGCCACUGAGGC |
| siRNA 925 | 925 | CCUCAGUGGCCAUGCAGGC | 3823 | GCCUGCAUGGCCACUGAGG |
| siRNA 926 | 926 | CUCAGUGGCCAUGCAGGCG | 3824 | CGCCUGCAUGGCCACUGAG |
| siRNA 927 | 927 | UCAGUGGCCAUGCAGGCGG | 3825 | CCGCCUGCAUGGCCACUGA |
| siRNA 928 | 928 | CAGUGGCCAUGCAGGCGGU | 3826 | ACCGCCUGCAUGGCCACUG |
| siRNA 929 | 929 | AGUGGCCAUGCAGGCGGUG | 3827 | CACCGCCUGCAUGGCCACU |
| siRNA 930 | 930 | GUGGCCAUGCAGGCGGUGU | 3828 | ACACCGCCUGCAUGGCCAC |
| siRNA 931 | 931 | UGGCCAUGCAGGCGGUGUC | 3829 | GACACCGCCUGCAUGGCCA |
| siRNA 932 | 932 | GGCCAUGCAGGCGGUGUCC | 3830 | GGACACCGCCUGCAUGGCC |
| siRNA 933 | 933 | GCCAUGCAGGCGGUGUCCC | 3831 | GGGACACCGCCUGCAUGGC |
| siRNA 934 | 934 | CCAUGCAGGCGGUGUCCCG | 3832 | CGGGACACCGCCUGCAUGG |
| siRNA 935 | 935 | CAUGCAGGCGGUGUCCCGG | 3833 | CCGGGACACCGCCUGCAUG |
| siRNA 936 | 936 | AUGCAGGCGGUGUCCCGGC | 3834 | GCCGGGACACCGCCUGCAU |
| siRNA 937 | 937 | UGCAGGCGGUGUCCCGGCG | 3835 | CGCCGGGACACCGCCUGCA |
| siRNA 938 | 938 | GCAGGCGGUGUCCCGGCGG | 3836 | CCGCCGGGACACCGCCUGC |
| siRNA 939 | 939 | CAGGCGGUGUCCCGGCGGA | 3837 | UCCGCCGGGACACCGCCUG |
| siRNA 940 | 940 | AGGCGGUGUCCCGGCGGAG | 3838 | CUCCGCCGGGACACCGCCU |
| siRNA 941 | 941 | GGCGGUGUCCCGGCGGAGG | 3839 | CCUCCGCCGGGACACCGCC |
| siRNA 942 | 942 | GCGGUGUCCCGGCGGAGGA | 3840 | UCCUCCGCCGGGACACCGC |
| siRNA 943 | 943 | CGGUGUCCCGGCGGAGGAG | 3841 | CUCCUCCGCCGGGACACCG |
| siRNA 944 | 944 | GGUGUCCCGGCGGAGGAGC | 3842 | GCUCCUCCGCCGGGACACC |
| siRNA 945 | 945 | GUGUCCCGGCGGAGGAGCG | 3843 | CGCUCCUCCGCCGGGACAC |
| siRNA 946 | 946 | UGUCCCGGCGGAGGAGCGA | 3844 | UCGCUCCUCCGCCGGGACA |
| siRNA 947 | 947 | GUCCCGGCGGAGGAGCGAA | 3845 | UUCGCUCCUCCGCCGGGAC |
| siRNA 948 | 948 | UCCCGGCGGAGGAGCGAAG | 3846 | CUUCGCUCCUCCGCCGGGA |
| siRNA 949 | 949 | CCCGGCGGAGGAGCGAAGU | 3847 | ACUUCGCUCCUCCGCCGGG |
| siRNA 950 | 950 | CCGGCGGAGGAGCGAAGUG | 3848 | CACUUCGCUCCUCCGCCGG |
| siRNA 951 | 951 | CGGCGGAGGAGCGAAGUGC | 3849 | GCACUUCGCUCCUCCGCCG |
| siRNA 952 | 952 | GGCGGAGGAGCGAAGUGCG | 3850 | CGCACUUCGCUCCUCCGCC |
| siRNA 953 | 953 | GCGGAGGAGCGAAGUGCGG | 3851 | CCGCACUUCGCUCCUCCGC |
| siRNA 954 | 954 | CGGAGGAGCGAAGUGCGGG | 3852 | CCCGCACUUCGCUCCUCCG |
| siRNA 955 | 955 | GGAGGAGCGAAGUGCGGGU | 3853 | ACCCGCACUUCGCUCCUCC |
| siRNA 956 | 956 | GAGGAGCGAAGUGCGGGUA | 3854 | UACCCGCACUUCGCUCCUC |
| siRNA 957 | 957 | AGGAGCGAAGUGCGGGUAC | 3855 | GUACCCGCACUUCGCUCCU |
| siRNA 958 | 958 | GGAGCGAAGUGCGGGUACC | 3856 | GGUACCCGCACUUCGCUCC |
| siRNA 959 | 959 | GAGCGAAGUGCGGGUACCC | 3857 | GGGUACCCGCACUUCGCUC |
| siRNA 960 | 960 | AGCGAAGUGCGGGUACCCU | 3858 | AGGGUACCCGCACUUCGCU |
| siRNA 961 | 961 | GCGAAGUGCGGGUACCCUG | 3859 | CAGGGUACCCGCACUUCGC |
| siRNA 962 | 962 | CGAAGUGCGGGUACCCUGG | 3860 | CCAGGGUACCCGCACUUCG |
| siRNA 963 | 963 | GAAGUGCGGGUACCCUGGC | 3861 | GCCAGGGUACCCGCACUUC |
| siRNA 964 | 964 | AAGUGCGGGUACCCUGGCU | 3862 | AGCCAGGGUACCCGCACUU |
| siRNA 965 | 965 | AGUGCGGGUACCCUGGCUG | 3863 | CAGCCAGGGUACCCGCACU |
| siRNA 966 | 966 | GUGCGGGUACCCUGGCUGC | 3864 | GCAGCCAGGGUACCCGCAC |
| siRNA 967 | 967 | UGCGGGUACCCUGGCUGCA | 3865 | UGCAGCCAGGGUACCCGCA |
| siRNA 968 | 968 | GCGGGUACCCUGGCUGCAC | 3866 | GUGCAGCCAGGGUACCCGC |
| siRNA 969 | 969 | CGGGUACCCUGGCUGCACA | 3867 | UGUGCAGCCAGGGUACCCG |
| siRNA 970 | 970 | GGGUACCCUGGCUGCACAG | 3868 | CUGUGCAGCCAGGGUACCC |
| siRNA 971 | 971 | GGUACCCUGGCUGCACAGC | 3869 | GCUGUGCAGCCAGGGUACC |
| siRNA 972 | 972 | GUACCCUGGCUGCACAGCC | 3870 | GGCUGUGCAGCCAGGGUAC |
| siRNA 973 | 973 | UACCCUGGCUGCACAGCCU | 3871 | AGGCUGUGCAGCCAGGGUA |
| siRNA 974 | 974 | ACCCUGGCUGCACAGCCUC | 3872 | GAGGCUGUGCAGCCAGGGU |
| siRNA 975 | 975 | CCCUGGCUGCACAGCCUCG | 3873 | CGAGGCUGUGCAGCCAGGG |
| siRNA 976 | 976 | CCUGGCUGCACAGCCUCGC | 3874 | GCGAGGCUGUGCAGCCAGG |
| siRNA 977 | 977 | CUGGCUGCACAGCCUCGCA | 3875 | UGCGAGGCUGUGCAGCCAG |
| siRNA 978 | 978 | UGGCUGCACAGCCUCGCAG | 3876 | CUGCGAGGCUGUGCAGCCA |
| siRNA 979 | 979 | GGCUGCACAGCCUCGCAGC | 3877 | GCUGCGAGGCUGUGCAGCC |
| siRNA 980 | 980 | GCUGCACAGCCUCGCAGCC | 3878 | GGCUGCGAGGCUGUGCAGC |
| siRNA 981 | 981 | CUGCACAGCCUCGCAGCCG | 3879 | CGGCUGCGAGGCUGUGCAG |
| siRNA 982 | 982 | UGCACAGCCUCGCAGCCGC | 3880 | GCGGCUGCGAGGCUGUGCA |
| siRNA 983 | 983 | GCACAGCCUCGCAGCCGCC | 3881 | GGCGGCUGCGAGGCUGUGC |
| siRNA 984 | 984 | CACAGCCUCGCAGCCGCCC | 3882 | GGGCGGCUGCGAGGCUGUG |
| siRNA 985 | 985 | ACAGCCUCGCAGCCGCCCA | 3883 | UGGGCGGCUGCGAGGCUGU |
| siRNA 986 | 986 | CAGCCUCGCAGCCGCCCAG | 3884 | CUGGGCGGCUGCGAGGCUG |
| siRNA 987 | 987 | AGCCUCGCAGCCGCCCAGG | 3885 | CCUGGGCGGCUGCGAGGCU |
| siRNA 988 | 988 | GCCUCGCAGCCGCCCAGGA | 3886 | UCCUGGGCGGCUGCGAGGC |
| siRNA 989 | 989 | CCUCGCAGCCGCCCAGGAG | 3887 | CUCCUGGGCGGCUGCGAGG |
| siRNA 990 | 990 | CUCGCAGCCGCCCAGGAGG | 3888 | CCUCCUGGGCGGCUGCGAG |
| siRNA 991 | 991 | UCGCAGCCGCCCAGGAGGA | 3889 | UCCUCCUGGGCGGCUGCGA |
| siRNA 992 | 992 | CGCAGCCGCCCAGGAGGAG | 3890 | CUCCUCCUGGGCGGCUGCG |
| siRNA 993 | 993 | GCAGCCGCCCAGGAGGAGG | 3891 | CCUCCUCCUGGGCGGCUGC |
| siRNA 994 | 994 | CAGCCGCCCAGGAGGAGGA | 3892 | UCCUCCUCCUGGGCGGCUG |
| siRNA 995 | 995 | AGCCGCCCAGGAGGAGGAU | 3893 | AUCCUCCUCCUGGGCGGCU |
| siRNA 996 | 996 | GCCGCCCAGGAGGAGGAUC | 3894 | GAUCCUCCUCCUGGGCGGC |
| siRNA 997 | 997 | CCGCCCAGGAGGAGGAUCA | 3895 | UGAUCCUCCUCCUGGGCGG |
| siRNA 998 | 998 | CGCCCAGGAGGAGGAUCAU | 3896 | AUGAUCCUCCUCCUGGGCG |
| siRNA 999 | 999 | GCCCAGGAGGAGGAUCAUG | 3897 | CAUGAUCCUCCUCCUGGGC |
| siRNA 1000 | 1000 | CCCAGGAGGAGGAUCAUGA | 3898 | UCAUGAUCCUCCUCCUGGG |
| siRNA 1001 | 1001 | CCAGGAGGAGGAUCAUGAG | 3899 | CUCAUGAUCCUCCUCCUGG |
| siRNA 1002 | 1002 | CAGGAGGAGGAUCAUGAGG | 3900 | CCUCAUGAUCCUCCUCCUG |
| siRNA 1003 | 1003 | AGGAGGAGGAUCAUGAGGA | 3901 | UCCUCAUGAUCCUCCUCCU |
| siRNA 1004 | 1004 | GGAGGAGGAUCAUGAGGAC | 3902 | GUCCUCAUGAUCCUCCUCC |
| siRNA 1005 | 1005 | GAGGAGGAUCAUGAGGACC | 3903 | GGUCCUCAUGAUCCUCCUC |
| siRNA 1006 | 1006 | AGGAGGAUCAUGAGGACCA | 3904 | UGGUCCUCAUGAUCCUCCU |
| siRNA 1007 | 1007 | GGAGGAUCAUGAGGACCAG | 3905 | CUGGUCCUCAUGAUCCUCC |
| siRNA 1008 | 1008 | GAGGAUCAUGAGGACCAGA | 3906 | UCUGGUCCUCAUGAUCCUC |
| siRNA 1009 | 1009 | AGGAUCAUGAGGACCAGAC | 3907 | GUCUGGUCCUCAUGAUCCU |
| siRNA 1010 | 1010 | GGAUCAUGAGGACCAGACA | 3908 | UGUCUGGUCCUCAUGAUCC |
| siRNA 1011 | 1011 | GAUCAUGAGGACCAGACAG | 3909 | CUGUCUGGUCCUCAUGAUC |
| siRNA 1012 | 1012 | AUCAUGAGGACCAGACAGA | 3910 | UCUGUCUGGUCCUCAUGAU |
| siRNA 1013 | 1013 | UCAUGAGGACCAGACAGAC | 3911 | GUCUGUCUGGUCCUCAUGA |
| siRNA 1014 | 1014 | CAUGAGGACCAGACAGACA | 3912 | UGUCUGUCUGGUCCUCAUG |
| siRNA 1015 | 1015 | AUGAGGACCAGACAGACAC | 3913 | GUGUCUGUCUGGUCCUCAU |
| siRNA 1016 | 1016 | UGAGGACCAGACAGACACG | 3914 | CGUGUCUGUCUGGUCCUCA |
| siRNA 1017 | 1017 | GAGGACCAGACAGACACGG | 3915 | CCGUGUCUGUCUGGUCCUC |
| siRNA 1018 | 1018 | AGGACCAGACAGACACGGA | 3916 | UCCGUGUCUGUCUGGUCCU |
| siRNA 1019 | 1019 | GGACCAGACAGACACGGAG | 3917 | CUCCGUGUCUGUCUGGUCC |
| siRNA 1020 | 1020 | GACCAGACAGACACGGAGG | 3918 | CCUCCGUGUCUGUCUGGUC |
| siRNA 1021 | 1021 | ACCAGACAGACACGGAGGG | 3919 | CCCUCCGUGUCUGUCUGGU |
| siRNA 1022 | 1022 | CCAGACAGACACGGAGGGA | 3920 | UCCCUCCGUGUCUGUCUGG |
| siRNA 1023 | 1023 | CAGACAGACACGGAGGGAG | 3921 | CUCCCUCCGUGUCUGUCUG |
| siRNA 1024 | 1024 | AGACAGACACGGAGGGAGA | 3922 | UCUCCCUCCGUGUCUGUCU |
| siRNA 1025 | 1025 | GACAGACACGGAGGGAGAG | 3923 | CUCUCCCUCCGUGUCUGUC |
| siRNA 1026 | 1026 | ACAGACACGGAGGGAGAGG | 3924 | CCUCUCCCUCCGUGUCUGU |
| siRNA 1027 | 1027 | CAGACACGGAGGGAGAGGA | 3925 | UCCUCUCCCUCCGUGUCUG |
| siRNA 1028 | 1028 | AGACACGGAGGGAGAGGAC | 3926 | GUCCUCUCCCUCCGUGUCU |
| siRNA 1029 | 1029 | GACACGGAGGGAGAGGACA | 3927 | UGUCCUCUCCCUCCGUGUC |
| siRNA 1030 | 1030 | ACACGGAGGGAGAGGACAC | 3928 | GUGUCCUCUCCCUCCGUGU |
| siRNA 1031 | 1031 | CACGGAGGGAGAGGACACG | 3929 | CGUGUCCUCUCCCUCCGUG |
| siRNA 1032 | 1032 | ACGGAGGGAGAGGACACGG | 3930 | CCGUGUCCUCUCCCUCCGU |
| siRNA 1033 | 1033 | CGGAGGGAGAGGACACGGA | 3931 | UCCGUGUCCUCUCCCUCCG |
| siRNA 1034 | 1034 | GGAGGGAGAGGACACGGAG | 3932 | CUCCGUGUCCUCUCCCUCC |
| siRNA 1035 | 1035 | GAGGGAGAGGACACGGAGG | 3933 | CCUCCGUGUCCUCUCCCUC |
| siRNA 1036 | 1036 | AGGGAGAGGACACGGAGGA | 3934 | UCCUCCGUGUCCUCUCCCU |
| siRNA 1037 | 1037 | GGGAGAGGACACGGAGGAG | 3935 | CUCCUCCGUGUCCUCUCCC |
| siRNA 1038 | 1038 | GGAGAGGACACGGAGGAGG | 3936 | CCUCCUCCGUGUCCUCUCC |
| siRNA 1039 | 1039 | GAGAGGACACGGAGGAGGA | 3937 | UCCUCCUCCGUGUCCUCUC |
| siRNA 1040 | 1040 | AGAGGACACGGAGGAGGAG | 3938 | CUCCUCCUCCGUGUCCUCU |
| siRNA 1041 | 1041 | GAGGACACGGAGGAGGAGG | 3939 | CCUCCUCCUCCGUGUCCUC |
| siRNA 1042 | 1042 | AGGACACGGAGGAGGAGGA | 3940 | UCCUCCUCCUCCGUGUCCU |
| siRNA 1043 | 1043 | GGACACGGAGGAGGAGGAA | 3941 | UUCCUCCUCCUCCGUGUCC |
| siRNA 1044 | 1044 | GACACGGAGGAGGAGGAAG | 3942 | CUUCCUCCUCCUCCGUGUC |
| siRNA 1045 | 1045 | ACACGGAGGAGGAGGAAGA | 3943 | UCUUCCUCCUCCUCCGUGU |
| siRNA 1046 | 1046 | CACGGAGGAGGAGGAAGAA | 3944 | UUCUUCCUCCUCCUCCGUG |
| siRNA 1047 | 1047 | ACGGAGGAGGAGGAAGAAU | 3945 | AUUCUUCCUCCUCCUCCGU |
| siRNA 1048 | 1048 | CGGAGGAGGAGGAAGAAUU | 3946 | AAUUCUUCCUCCUCCUCCG |
| siRNA 1049 | 1049 | GGAGGAGGAGGAAGAAUUG | 3947 | CAAUUCUUCCUCCUCCUCC |
| siRNA 1050 | 1050 | GAGGAGGAGGAAGAAUUGG | 3948 | CCAAUUCUUCCUCCUCCUC |
| siRNA 1051 | 1051 | AGGAGGAGGAAGAAUUGGA | 3949 | UCCAAUUCUUCCUCCUCCU |
| siRNA 1052 | 1052 | GGAGGAGGAAGAAUUGGAG | 3950 | CUCCAAUUCUUCCUCCUCC |
| siRNA 1053 | 1053 | GAGGAGGAAGAAUUGGAGA | 3951 | UCUCCAAUUCUUCCUCCUC |
| siRNA 1054 | 1054 | AGGAGGAAGAAUUGGAGAC | 3952 | GUCUCCAAUUCUUCCUCCU |
| siRNA 1055 | 1055 | GGAGGAAGAAUUGGAGACU | 3953 | AGUCUCCAAUUCUUCCUCC |
| siRNA 1056 | 1056 | GAGGAAGAAUUGGAGACUG | 3954 | CAGUCUCCAAUUCUUCCUC |
| siRNA 1057 | 1057 | AGGAAGAAUUGGAGACUGA | 3955 | UCAGUCUCCAAUUCUUCCU |
| siRNA 1058 | 1058 | GGAAGAAUUGGAGACUGAG | 3956 | CUCAGUCUCCAAUUCUUCC |
| siRNA 1059 | 1059 | GAAGAAUUGGAGACUGAGG | 3957 | CCUCAGUCUCCAAUUCUUC |
| siRNA 1060 | 1060 | AAGAAUUGGAGACUGAGGA | 3958 | UCCUCAGUCUCCAAUUCUU |
| siRNA 1061 | 1061 | AGAAUUGGAGACUGAGGAG | 3959 | CUCCUCAGUCUCCAAUUCU |
| siRNA 1062 | 1062 | GAAUUGGAGACUGAGGAGA | 3960 | UCUCCUCAGUCUCCAAUUC |
| siRNA 1063 | 1063 | AAUUGGAGACUGAGGAGAA | 3961 | UUCUCCUCAGUCUCCAAUU |
| siRNA 1064 | 1064 | AUUGGAGACUGAGGAGAAC | 3962 | GUUCUCCUCAGUCUCCAAU |
| siRNA 1065 | 1065 | UUGGAGACUGAGGAGAACA | 3963 | UGUUCUCCUCAGUCUCCAA |
| siRNA 1066 | 1066 | UGGAGACUGAGGAGAACAA | 3964 | UUGUUCUCCUCAGUCUCCA |
| siRNA 1067 | 1067 | GGAGACUGAGGAGAACAAG | 3965 | CUUGUUCUCCUCAGUCUCC |
| siRNA 1068 | 1068 | GAGACUGAGGAGAACAAGU | 3966 | ACUUGUUCUCCUCAGUCUC |
| siRNA 1069 | 1069 | AGACUGAGGAGAACAAGUU | 3967 | AACUUGUUCUCCUCAGUCU |
| siRNA 1070 | 1070 | GACUGAGGAGAACAAGUUC | 3968 | GAACUUGUUCUCCUCAGUC |
| siRNA 1071 | 1071 | ACUGAGGAGAACAAGUUCA | 3969 | UGAACUUGUUCUCCUCAGU |
| siRNA 1072 | 1072 | CUGAGGAGAACAAGUUCAG | 3970 | CUGAACUUGUUCUCCUCAG |
| siRNA 1073 | 1073 | UGAGGAGAACAAGUUCAGU | 3971 | ACUGAACUUGUUCUCCUCA |
| siRNA 1074 | 1074 | GAGGAGAACAAGUUCAGUG | 3972 | CACUGAACUUGUUCUCCUC |
| siRNA 1075 | 1075 | AGGAGAACAAGUUCAGUGA | 3973 | UCACUGAACUUGUUCUCCU |
| siRNA 1076 | 1076 | GGAGAACAAGUUCAGUGAG | 3974 | CUCACUGAACUUGUUCUCC |
| siRNA 1077 | 1077 | GAGAACAAGUUCAGUGAGG | 3975 | CCUCACUGAACUUGUUCUC |
| siRNA 1078 | 1078 | AGAACAAGUUCAGUGAGGU | 3976 | ACCUCACUGAACUUGUUCU |
| siRNA 1079 | 1079 | GAACAAGUUCAGUGAGGUA | 3977 | UACCUCACUGAACUUGUUC |
| siRNA 1080 | 1080 | AACAAGUUCAGUGAGGUAG | 3978 | CUACCUCACUGAACUUGUU |
| siRNA 1081 | 1081 | ACAAGUUCAGUGAGGUAGC | 3979 | GCUACCUCACUGAACUUGU |
| siRNA 1082 | 1082 | CAAGUUCAGUGAGGUAGCA | 3980 | UGCUACCUCACUGAACUUG |
| siRNA 1083 | 1083 | AAGUUCAGUGAGGUAGCAG | 3981 | CUGCUACCUCACUGAACUU |
| siRNA 1084 | 1084 | AGUUCAGUGAGGUAGCAGC | 3982 | GCUGCUACCUCACUGAACU |
| siRNA 1085 | 1085 | GUUCAGUGAGGUAGCAGCC | 3983 | GGCUGCUACCUCACUGAAC |
| siRNA 1086 | 1086 | UUCAGUGAGGUAGCAGCCC | 3984 | GGGCUGCUACCUCACUGAA |
| siRNA 1087 | 1087 | UCAGUGAGGUAGCAGCCCU | 3985 | AGGGCUGCUACCUCACUGA |
| siRNA 1088 | 1088 | CAGUGAGGUAGCAGCCCUG | 3986 | CAGGGCUGCUACCUCACUG |
| siRNA 1089 | 1089 | AGUGAGGUAGCAGCCCUGC | 3987 | GCAGGGCUGCUACCUCACU |
| siRNA 1090 | 1090 | GUGAGGUAGCAGCCCUGCC | 3988 | GGCAGGGCUGCUACCUCAC |
| siRNA 1091 | 1091 | UGAGGUAGCAGCCCUGCCA | 3989 | UGGCAGGGCUGCUACCUCA |
| siRNA 1092 | 1092 | GAGGUAGCAGCCCUGCCAG | 3990 | CUGGCAGGGCUGCUACCUC |
| siRNA 1093 | 1093 | AGGUAGCAGCCCUGCCAGG | 3991 | CCUGGCAGGGCUGCUACCU |
| siRNA 1094 | 1094 | GGUAGCAGCCCUGCCAGGC | 3992 | GCCUGGCAGGGCUGCUACC |
| siRNA 1095 | 1095 | GUAGCAGCCCUGCCAGGCC | 3993 | GGCCUGGCAGGGCUGCUAC |
| siRNA 1096 | 1096 | UAGCAGCCCUGCCAGGCCC | 3994 | GGGCCUGGCAGGGCUGCUA |
| siRNA 1097 | 1097 | AGCAGCCCUGCCAGGCCCU | 3995 | AGGGCCUGGCAGGGCUGCU |
| siRNA 1098 | 1098 | GCAGCCCUGCCAGGCCCUC | 3996 | GAGGGCCUGGCAGGGCUGC |
| siRNA 1099 | 1099 | CAGCCCUGCCAGGCCCUCG | 3997 | CGAGGGCCUGGCAGGGCUG |
| siRNA 1100 | 1100 | AGCCCUGCCAGGCCCUCGA | 3998 | UCGAGGGCCUGGCAGGGCU |
| siRNA 1101 | 1101 | GCCCUGCCAGGCCCUCGAG | 3999 | CUCGAGGGCCUGGCAGGGC |
| siRNA 1102 | 1102 | CCCUGCCAGGCCCUCGAGG | 4000 | CCUCGAGGGCCUGGCAGGG |
| siRNA 1103 | 1103 | CCUGCCAGGCCCUCGAGGC | 4001 | GCCUCGAGGGCCUGGCAGG |
| siRNA 1104 | 1104 | CUGCCAGGCCCUCGAGGCC | 4002 | GGCCUCGAGGGCCUGGCAG |
| SIRNA 1105 | 1105 | UGCCAGGCCCUCGAGGCCU | 4003 | AGGCCUCGAGGGCCUGGCA |
| siRNA 1106 | 1106 | GCCAGGCCCUCGAGGCCUC | 4004 | GAGGCCUCGAGGGCCUGGC |
| siRNA 1107 | 1107 | CCAGGCCCUCGAGGCCUCC | 4005 | GGAGGCCUCGAGGGCCUGG |
| siRNA 1108 | 1108 | CAGGCCCUCGAGGCCUCCU | 4006 | AGGAGGCCUCGAGGGCCUG |
| siRNA 1109 | 1109 | AGGCCCUCGAGGCCUCCUG | 4007 | CAGGAGGCCUCGAGGGCCU |
| siRNA 1110 | 1110 | GGCCCUCGAGGCCUCCUGG | 4008 | CCAGGAGGCCUCGAGGGCC |
| SiRNA 1111 | 1111 | GCCCUCGAGGCCUCCUGGG | 4009 | CCCAGGAGGCCUCGAGGGC |
| siRNA 1112 | 1112 | CCCUCGAGGCCUCCUGGGU | 4010 | ACCCAGGAGGCCUCGAGGG |
| siRNA 1113 | 1113 | CCUCGAGGCCUCCUGGGUG | 4011 | CACCCAGGAGGCCUCGAGG |
| siRNA 1114 | 1114 | CUCGAGGCCUCCUGGGUGG | 4012 | CCACCCAGGAGGCCUCGAG |
| siRNA 1115 | 1115 | UCGAGGCCUCCUGGGUGGU | 4013 | ACCACCCAGGAGGCCUCGA |
| siRNA 1116 | 1116 | CGAGGCCUCCUGGGUGGUG | 4014 | CACCACCCAGGAGGCCUCG |
| siRNA 1117 | 1117 | GAGGCCUCCUGGGUGGUGU | 4015 | ACACCACCCAGGAGGCCUC |
| siRNA 1118 | 1118 | AGGCCUCCUGGGUGGUGUG | 4016 | CACACCACCCAGGAGGCCU |
| siRNA 1119 | 1119 | GGCCUCCUGGGUGGUGUGG | 4017 | CCACACCACCCAGGAGGCC |
| siRNA 1120 | 1120 | GCCUCCUGGGUGGUGUGGC | 4018 | GCCACACCACCCAGGAGGC |
| siRNA 1121 | 1121 | CCUCCUGGGUGGUGUGGCA | 4019 | UGCCACACCACCCAGGAGG |
| siRNA 1122 | 1122 | CUCCUGGGUGGUGUGGCAC | 4020 | GUGCCACACCACCCAGGAG |
| siRNA 1123 | 1123 | UCCUGGGUGGUGUGGCACA | 4021 | UGUGCCACACCACCCAGGA |
| siRNA 1124 | 1124 | CCUGGGUGGUGUGGCACAU | 4022 | AUGUGCCACACCACCCAGG |
| siRNA 1125 | 1125 | CUGGGUGGUGUGGCACAUA | 4023 | UAUGUGCCACACCACCCAG |
| siRNA 1126 | 1126 | UGGGUGGUGUGGCACAUAC | 4024 | GUAUGUGCCACACCACCCA |
| siRNA 1127 | 1127 | GGGUGGUGUGGCACAUACC | 4025 | GGUAUGUGCCACACCACCC |
| siRNA 1128 | 1128 | GGUGGUGUGGCACAUACCC | 4026 | GGGUAUGUGCCACACCACC |
| siRNA 1129 | 1129 | GUGGUGUGGCACAUACCCU | 4027 | AGGGUAUGUGCCACACCAC |
| siRNA 1130 | 1130 | UGGUGUGGCACAUACCCUG | 4028 | CAGGGUAUGUGCCACACCA |
| siRNA 1131 | 1131 | GGUGUGGCACAUACCCUGC | 4029 | GCAGGGUAUGUGCCACACC |
| siRNA 1132 | 1132 | GUGUGGCACAUACCCUGCA | 4030 | UGCAGGGUAUGUGCCACAC |
| siRNA 1133 | 1133 | UGUGGCACAUACCCUGCAG | 4031 | CUGCAGGGUAUGUGCCACA |
| siRNA 1134 | 1134 | GUGGCACAUACCCUGCAGA | 4032 | UCUGCAGGGUAUGUGCCAC |
| siRNA 1135 | 1135 | UGGCACAUACCCUGCAGAA | 4033 | UUCUGCAGGGUAUGUGCCA |
| siRNA 1136 | 1136 | GGCACAUACCCUGCAGAAG | 4034 | CUUCUGCAGGGUAUGUGCC |
| siRNA 1137 | 1137 | GCACAUACCCUGCAGAAGA | 4035 | UCUUCUGCAGGGUAUGUGC |
| SIRNA 1138 | 1138 | CACAUACCCUGCAGAAGAC | 4036 | GUCUUCUGCAGGGUAUGUG |
| siRNA 1139 | 1139 | ACAUACCCUGCAGAAGACC | 4037 | GGUCUUCUGCAGGGUAUGU |
| siRNA 1140 | 1140 | CAUACCCUGCAGAAGACCC | 4038 | GGGUCUUCUGCAGGGUAUG |
| siRNA 1141 | 1141 | AUACCCUGCAGAAGACCCU | 4039 | AGGGUCUUCUGCAGGGUAU |
| siRNA 1142 | 1142 | UACCCUGCAGAAGACCCUC | 4040 | GAGGGUCUUCUGCAGGGUA |
| siRNA 1143 | 1143 | ACCCUGCAGAAGACCCUCC | 4041 | GGAGGGUCUUCUGCAGGGU |
| siRNA 1144 | 1144 | CCCUGCAGAAGACCCUCCA | 4042 | UGGAGGGUCUUCUGCAGGG |
| siRNA 1145 | 1145 | CCUGCAGAAGACCCUCCAG | 4043 | CUGGAGGGUCUUCUGCAGG |
| siRNA 1146 | 1146 | CUGCAGAAGACCCUCCAGA | 4044 | UCUGGAGGGUCUUCUGCAG |
| siRNA 1147 | 1147 | UGCAGAAGACCCUCCAGAC | 4045 | GUCUGGAGGGUCUUCUGCA |
| siRNA 1148 | 1148 | GCAGAAGACCCUCCAGACC | 4046 | GGUCUGGAGGGUCUUCUGC |
| siRNA 1149 | 1149 | CAGAAGACCCUCCAGACCA | 4047 | UGGUCUGGAGGGUCUUCUG |
| siRNA 1150 | 1150 | AGAAGACCCUCCAGACCAC | 4048 | GUGGUCUGGAGGGUCUUCU |
| siRNA 1151 | 1151 | GAAGACCCUCCAGACCACC | 4049 | GGUGGUCUGGAGGGUCUUC |
| siRNA 1152 | 1152 | AAGACCCUCCAGACCACCA | 4050 | UGGUGGUCUGGAGGGUCUU |
| siRNA 1153 | 1153 | AGACCCUCCAGACCACCAU | 4051 | AUGGUGGUCUGGAGGGUCU |
| SiRNA 1154 | 1154 | GACCCUCCAGACCACCAUC | 4052 | GAUGGUGGUCUGGAGGGUC |
| siRNA 1155 | 1155 | ACCCUCCAGACCACCAUCU | 4053 | AGAUGGUGGUCUGGAGGGU |
| siRNA 1156 | 1156 | CCCUCCAGACCACCAUCUC | 4054 | GAGAUGGUGGUCUGGAGGG |
| siRNA 1157 | 1157 | CCUCCAGACCACCAUCUCG | 4055 | CGAGAUGGUGGUCUGGAGG |
| siRNA 1158 | 1158 | CUCCAGACCACCAUCUCGG | 4056 | CCGAGAUGGUGGUCUGGAG |
| siRNA 1159 | 1159 | UCCAGACCACCAUCUCGGC | 4057 | GCCGAGAUGGUGGUCUGGA |
| siRNA 1160 | 1160 | CCAGACCACCAUCUCGGCU | 4058 | AGCCGAGAUGGUGGUCUGG |
| siRNA 1161 | 1161 | CAGACCACCAUCUCGGCUG | 4059 | CAGCCGAGAUGGUGGUCUG |
| SIRNA 1162 | 1162 | AGACCACCAUCUCGGCUGU | 4060 | ACAGCCGAGAUGGUGGUCU |
| siRNA 1163 | 1163 | GACCACCAUCUCGGCUGUG | 4061 | CACAGCCGAGAUGGUGGUC |
| siRNA 1164 | 1164 | ACCACCAUCUCGGCUGUGA | 4062 | UCACAGCCGAGAUGGUGGU |
| siRNA 1165 | 1165 | CCACCAUCUCGGCUGUGAC | 4063 | GUCACAGCCGAGAUGGUGG |
| siRNA 1166 | 1166 | CACCAUCUCGGCUGUGACA | 4064 | UGUCACAGCCGAGAUGGUG |
| siRNA 1167 | 1167 | ACCAUCUCGGCUGUGACAU | 4065 | AUGUCACAGCCGAGAUGGU |
| siRNA 1168 | 1168 | CCAUCUCGGCUGUGACAUG | 4066 | CAUGUCACAGCCGAGAUGG |
| siRNA 1169 | 1169 | CAUCUCGGCUGUGACAUGG | 4067 | CCAUGUCACAGCCGAGAUG |
| siRNA 1170 | 1170 | AUCUCGGCUGUGACAUGGG | 4068 | CCCAUGUCACAGCCGAGAU |
| siRNA 1171 | 1171 | UCUCGGCUGUGACAUGGGC | 4069 | GCCCAUGUCACAGCCGAGA |
| siRNA 1172 | 1172 | CUCGGCUGUGACAUGGGCA | 4070 | UGCCCAUGUCACAGCCGAG |
| siRNA 1173 | 1173 | UCGGCUGUGACAUGGGCAC | 4071 | GUGCCCAUGUCACAGCCGA |
| siRNA 1174 | 1174 | CGGCUGUGACAUGGGCACC | 4072 | GGUGCCCAUGUCACAGCCG |
| siRNA 1175 | 1175 | GGCUGUGACAUGGGCACCU | 4073 | AGGUGCCCAUGUCACAGCC |
| siRNA 1176 | 1176 | GCUGUGACAUGGGCACCUG | 4074 | CAGGUGCCCAUGUCACAGC |
| siRNA 1177 | 1177 | CUGUGACAUGGGCACCUGC | 4075 | GCAGGUGCCCAUGUCACAG |
| siRNA 1178 | 1178 | UGUGACAUGGGCACCUGCA | 4076 | UGCAGGUGCCCAUGUCACA |
| siRNA 1179 | 1179 | GUGACAUGGGCACCUGCAG | 4077 | CUGCAGGUGCCCAUGUCAC |
| siRNA 1180 | 1180 | UGACAUGGGCACCUGCAGC | 4078 | GCUGCAGGUGCCCAUGUCA |
| siRNA 1181 | 1181 | GACAUGGGCACCUGCAGCU | 4079 | AGCUGCAGGUGCCCAUGUC |
| siRNA 1182 | 1182 | ACAUGGGCACCUGCAGCUG | 4080 | CAGCUGCAGGUGCCCAUGU |
| siRNA 1183 | 1183 | CAUGGGCACCUGCAGCUGU | 4081 | ACAGCUGCAGGUGCCCAUG |
| siRNA 1184 | 1184 | AUGGGCACCUGCAGCUGUG | 4082 | CACAGCUGCAGGUGCCCAU |
| siRNA 1185 | 1185 | UGGGCACCUGCAGCUGUGC | 4083 | GCACAGCUGCAGGUGCCCA |
| siRNA 1186 | 1186 | GGGCACCUGCAGCUGUGCU | 4084 | AGCACAGCUGCAGGUGCCC |
| siRNA 1187 | 1187 | GGCACCUGCAGCUGUGCUG | 4085 | CAGCACAGCUGCAGGUGCC |
| siRNA 1188 | 1188 | GCACCUGCAGCUGUGCUGG | 4086 | CCAGCACAGCUGCAGGUGC |
| siRNA 1189 | 1189 | CACCUGCAGCUGUGCUGGG | 4087 | CCCAGCACAGCUGCAGGUG |
| siRNA 1190 | 1190 | ACCUGCAGCUGUGCUGGGC | 4088 | GCCCAGCACAGCUGCAGGU |
| siRNA 1191 | 1191 | CCUGCAGCUGUGCUGGGCA | 4089 | UGCCCAGCACAGCUGCAGG |
| siRNA 1192 | 1192 | CUGCAGCUGUGCUGGGCAU | 4090 | AUGCCCAGCACAGCUGCAG |
| siRNA 1193 | 1193 | UGCAGCUGUGCUGGGCAUG | 4091 | CAUGCCCAGCACAGCUGCA |
| siRNA 1194 | 1194 | GCAGCUGUGCUGGGCAUGG | 4092 | CCAUGCCCAGCACAGCUGC |
| siRNA 1195 | 1195 | CAGCUGUGCUGGGCAUGGC | 4093 | GCCAUGCCCAGCACAGCUG |
| siRNA 1196 | 1196 | AGCUGUGCUGGGCAUGGCA | 4094 | UGCCAUGCCCAGCACAGCU |
| siRNA 1197 | 1197 | GCUGUGCUGGGCAUGGCAG | 4095 | CUGCCAUGCCCAGCACAGC |
| siRNA 1198 | 1198 | CUGUGCUGGGCAUGGCAGG | 4096 | CCUGCCAUGCCCAGCACAG |
| siRNA 1199 | 1199 | UGUGCUGGGCAUGGCAGGG | 4097 | CCCUGCCAUGCCCAGCACA |
| siRNA 1200 | 1200 | GUGCUGGGCAUGGCAGGGA | 4098 | UCCCUGCCAUGCCCAGCAC |
| siRNA 1201 | 1201 | UGCUGGGCAUGGCAGGGAG | 4099 | CUCCCUGCCAUGCCCAGCA |
| SiRNA 1202 | 1202 | GCUGGGCAUGGCAGGGAGG | 4100 | CCUCCCUGCCAUGCCCAGC |
| siRNA 1203 | 1203 | CUGGGCAUGGCAGGGAGGG | 4101 | CCCUCCCUGCCAUGCCCAG |
| siRNA 1204 | 1204 | UGGGCAUGGCAGGGAGGGU | 4102 | ACCCUCCCUGCCAUGCCCA |
| siRNA 1205 | 1205 | GGGCAUGGCAGGGAGGGUG | 4103 | CACCCUCCCUGCCAUGCCC |
| siRNA 1206 | 1206 | GGCAUGGCAGGGAGGGUGC | 4104 | GCACCCUCCCUGCCAUGCC |
| siRNA 1207 | 1207 | GCAUGGCAGGGAGGGUGCU | 4105 | AGCACCCUCCCUGCCAUGC |
| siRNA 1208 | 1208 | CAUGGCAGGGAGGGUGCUG | 4106 | CAGCACCCUCCCUGCCAUG |
| siRNA 1209 | 1209 | AUGGCAGGGAGGGUGCUGC | 4107 | GCAGCACCCUCCCUGCCAU |
| siRNA 1210 | 1210 | UGGCAGGGAGGGUGCUGCA | 4108 | UGCAGCACCCUCCCUGCCA |
| siRNA 1211 | 1211 | GGCAGGGAGGGUGCUGCAC | 4109 | GUGCAGCACCCUCCCUGCC |
| siRNA 1212 | 1212 | GCAGGGAGGGUGCUGCACC | 4110 | GGUGCAGCACCCUCCCUGC |
| siRNA 1213 | 1213 | CAGGGAGGGUGCUGCACCU | 4111 | AGGUGCAGCACCCUCCCUG |
| siRNA 1214 | 1214 | AGGGAGGGUGCUGCACCUC | 4112 | GAGGUGCAGCACCCUCCCU |
| siRNA 1215 | 1215 | GGGAGGGUGCUGCACCUCA | 4113 | UGAGGUGCAGCACCCUCCC |
| siRNA 1216 | 1216 | GGAGGGUGCUGCACCUCAC | 4114 | GUGAGGUGCAGCACCCUCC |
| siRNA 1217 | 1217 | GAGGGUGCUGCACCUCACA | 4115 | UGUGAGGUGCAGCACCCUC |
| siRNA 1218 | 1218 | AGGGUGCUGCACCUCACAC | 4116 | GUGUGAGGUGCAGCACCCU |
| siRNA 1219 | 1219 | GGGUGCUGCACCUCACACC | 4117 | GGUGUGAGGUGCAGCACCC |
| siRNA 1220 | 1220 | GGUGCUGCACCUCACACCA | 4118 | UGGUGUGAGGUGCAGCACC |
| siRNA 1221 | 1221 | GUGCUGCACCUCACACCAG | 4119 | CUGGUGUGAGGUGCAGCAC |
| siRNA 1222 | 1222 | UGCUGCACCUCACACCAGC | 4120 | GCUGGUGUGAGGUGCAGCA |
| siRNA 1223 | 1223 | GCUGCACCUCACACCAGCC | 4121 | GGCUGGUGUGAGGUGCAGC |
| siRNA 1224 | 1224 | CUGCACCUCACACCAGCCC | 4122 | GGGCUGGUGUGAGGUGCAG |
| siRNA 1225 | 1225 | UGCACCUCACACCAGCCCC | 4123 | GGGGCUGGUGUGAGGUGCA |
| siRNA 1226 | 1226 | GCACCUCACACCAGCCCCU | 4124 | AGGGGCUGGUGUGAGGUGC |
| siRNA 1227 | 1227 | CACCUCACACCAGCCCCUG | 4125 | CAGGGGCUGGUGUGAGGUG |
| siRNA 1228 | 1228 | ACCUCACACCAGCCCCUGC | 4126 | GCAGGGGCUGGUGUGAGGU |
| siRNA 1229 | 1229 | CCUCACACCAGCCCCUGCU | 4127 | AGCAGGGGCUGGUGUGAGG |
| siRNA 1230 | 1230 | CUCACACCAGCCCCUGCUG | 4128 | CAGCAGGGGCUGGUGUGAG |
| siRNA 1231 | 1231 | UCACACCAGCCCCUGCUGU | 4129 | ACAGCAGGGGCUGGUGUGA |
| siRNA 1232 | 1232 | CACACCAGCCCCUGCUGUC | 4130 | GACAGCAGGGGCUGGUGUG |
| siRNA 1233 | 1233 | ACACCAGCCCCUGCUGUCU | 4131 | AGACAGCAGGGGCUGGUGU |
| siRNA 1234 | 1234 | CACCAGCCCCUGCUGUCUC | 4132 | GAGACAGCAGGGGCUGGUG |
| siRNA 1235 | 1235 | ACCAGCCCCUGCUGUCUCC | 4133 | GGAGACAGCAGGGGCUGGU |
| siRNA 1236 | 1236 | CCAGCCCCUGCUGUCUCCU | 4134 | AGGAGACAGCAGGGGCUGG |
| siRNA 1237 | 1237 | CAGCCCCUGCUGUCUCCUC | 4135 | GAGGAGACAGCAGGGGCUG |
| siRNA 1238 | 1238 | AGCCCCUGCUGUCUCCUCA | 4136 | UGAGGAGACAGCAGGGGCU |
| siRNA 1239 | 1239 | GCCCCUGCUGUCUCCUCAA | 4137 | UUGAGGAGACAGCAGGGGC |
| SiRNA 1240 | 1240 | CCCCUGCUGUCUCCUCAAC | 4138 | GUUGAGGAGACAGCAGGGG |
| siRNA 1241 | 1241 | CCCUGCUGUCUCCUCAACC | 4139 | GGUUGAGGAGACAGCAGGG |
| siRNA 1242 | 1242 | CCUGCUGUCUCCUCAACCA | 4140 | UGGUUGAGGAGACAGCAGG |
| siRNA 1243 | 1243 | CUGCUGUCUCCUCAACCAA | 4141 | UUGGUUGAGGAGACAGCAG |
| siRNA 1244 | 1244 | UGCUGUCUCCUCAACCAAG | 4142 | CUUGGUUGAGGAGACAGCA |
| siRNA 1245 | 1245 | GCUGUCUCCUCAACCAAGG | 4143 | CCUUGGUUGAGGAGACAGC |
| siRNA 1246 | 1246 | CUGUCUCCUCAACCAAGGG | 4144 | CCCUUGGUUGAGGAGACAG |
| siRNA 1247 | 1247 | UGUCUCCUCAACCAAGGGG | 4145 | CCCCUUGGUUGAGGAGACA |
| siRNA 1248 | 1248 | GUCUCCUCAACCAAGGGGA | 4146 | UCCCCUUGGUUGAGGAGAC |
| siRNA 1249 | 1249 | UCUCCUCAACCAAGGGGAG | 4147 | CUCCCCUUGGUUGAGGAGA |
| siRNA 1250 | 1250 | CUCCUCAACCAAGGGGAGG | 4148 | CCUCCCCUUGGUUGAGGAG |
| siRNA 1251 | 1251 | UCCUCAACCAAGGGGAGGG | 4149 | CCCUCCCCUUGGUUGAGGA |
| siRNA 1252 | 1252 | CCUCAACCAAGGGGAGGGC | 4150 | GCCCUCCCCUUGGUUGAGG |
| siRNA 1253 | 1253 | CUCAACCAAGGGGAGGGCC | 4151 | GGCCCUCCCCUUGGUUGAG |
| siRNA 1254 | 1254 | UCAACCAAGGGGAGGGCCA | 4152 | UGGCCCUCCCCUUGGUUGA |
| siRNA 1255 | 1255 | CAACCAAGGGGAGGGCCAU | 4153 | AUGGCCCUCCCCUUGGUUG |
| siRNA 1256 | 1256 | AACCAAGGGGAGGGCCAUG | 4154 | CAUGGCCCUCCCCUUGGUU |
| siRNA 1257 | 1257 | ACCAAGGGGAGGGCCAUGU | 4155 | ACAUGGCCCUCCCCUUGGU |
| siRNA 1258 | 1258 | CCAAGGGGAGGGCCAUGUC | 4156 | GACAUGGCCCUCCCCUUGG |
| siRNA 1259 | 1259 | CAAGGGGAGGGCCAUGUCC | 4157 | GGACAUGGCCCUCCCCUUG |
| siRNA 1260 | 1260 | AAGGGGAGGGCCAUGUCCC | 4158 | GGGACAUGGCCCUCCCCUU |
| siRNA 1261 | 1261 | AGGGGAGGGCCAUGUCCCU | 4159 | AGGGACAUGGCCCUCCCCU |
| siRNA 1262 | 1262 | GGGGAGGGCCAUGUCCCUA | 4160 | UAGGGACAUGGCCCUCCCC |
| siRNA 1263 | 1263 | GGGAGGGCCAUGUCCCUAU | 4161 | AUAGGGACAUGGCCCUCCC |
| siRNA 1264 | 1264 | GGAGGGCCAUGUCCCUAUC | 4162 | GAUAGGGACAUGGCCCUCC |
| siRNA 1265 | 1265 | GAGGGCCAUGUCCCUAUCA | 4163 | UGAUAGGGACAUGGCCCUC |
| siRNA 1266 | 1266 | AGGGCCAUGUCCCUAUCAG | 4164 | CUGAUAGGGACAUGGCCCU |
| SIRNA 1267 | 1267 | GGGCCAUGUCCCUAUCAGA | 4165 | UCUGAUAGGGACAUGGCCC |
| siRNA 1268 | 1268 | GGCCAUGUCCCUAUCAGAU | 4166 | AUCUGAUAGGGACAUGGCC |
| siRNA 1269 | 1269 | GCCAUGUCCCUAUCAGAUG | 4167 | CAUCUGAUAGGGACAUGGC |
| siRNA 1270 | 1270 | CCAUGUCCCUAUCAGAUGC | 4168 | GCAUCUGAUAGGGACAUGG |
| siRNA 1271 | 1271 | CAUGUCCCUAUCAGAUGCC | 4169 | GGCAUCUGAUAGGGACAUG |
| siRNA 1272 | 1272 | AUGUCCCUAUCAGAUGCCC | 4170 | GGGCAUCUGAUAGGGACAU |
| siRNA 1273 | 1273 | UGUCCCUAUCAGAUGCCCU | 4171 | AGGGCAUCUGAUAGGGACA |
| siRNA 1274 | 1274 | GUCCCUAUCAGAUGCCCUG | 4172 | CAGGGCAUCUGAUAGGGAC |
| siRNA 1275 | 1275 | UCCCUAUCAGAUGCCCUGA | 4173 | UCAGGGCAUCUGAUAGGGA |
| siRNA 1276 | 1276 | CCCUAUCAGAUGCCCUGAA | 4174 | UUCAGGGCAUCUGAUAGGG |
| siRNA 1277 | 1277 | CCUAUCAGAUGCCCUGAAG | 4175 | CUUCAGGGCAUCUGAUAGG |
| siRNA 1278 | 1278 | CUAUCAGAUGCCCUGAAGG | 4176 | CCUUCAGGGCAUCUGAUAG |
| siRNA 1279 | 1279 | UAUCAGAUGCCCUGAAGGG | 4177 | CCCUUCAGGGCAUCUGAUA |
| siRNA 1280 | 1280 | AUCAGAUGCCCUGAAGGGC | 4178 | GCCCUUCAGGGCAUCUGAU |
| siRNA 1281 | 1281 | UCAGAUGCCCUGAAGGGCG | 4179 | CGCCCUUCAGGGCAUCUGA |
| siRNA 1282 | 1282 | CAGAUGCCCUGAAGGGCGU | 4180 | ACGCCCUUCAGGGCAUCUG |
| siRNA 1283 | 1283 | AGAUGCCCUGAAGGGCGUU | 4181 | AACGCCCUUCAGGGCAUCU |
| siRNA 1284 | 1284 | GAUGCCCUGAAGGGCGUUA | 4182 | UAACGCCCUUCAGGGCAUC |
| siRNA 1285 | 1285 | AUGCCCUGAAGGGCGUUAC | 4183 | GUAACGCCCUUCAGGGCAU |
| siRNA 1286 | 1286 | UGCCCUGAAGGGCGUUACU | 4184 | AGUAACGCCCUUCAGGGCA |
| siRNA 1287 | 1287 | GCCCUGAAGGGCGUUACUG | 4185 | CAGUAACGCCCUUCAGGGC |
| siRNA 1288 | 1288 | CCCUGAAGGGCGUUACUGA | 4186 | UCAGUAACGCCCUUCAGGG |
| siRNA 1289 | 1289 | CCUGAAGGGCGUUACUGAC | 4187 | GUCAGUAACGCCCUUCAGG |
| siRNA 1290 | 1290 | CUGAAGGGCGUUACUGACA | 4188 | UGUCAGUAACGCCCUUCAG |
| siRNA 1291 | 1291 | UGAAGGGCGUUACUGACAA | 4189 | UUGUCAGUAACGCCCUUCA |
| siRNA 1292 | 1292 | GAAGGGCGUUACUGACAAC | 4190 | GUUGUCAGUAACGCCCUUC |
| siRNA 1293 | 1293 | AAGGGCGUUACUGACAACG | 4191 | CGUUGUCAGUAACGCCCUU |
| siRNA 1294 | 1294 | AGGGCGUUACUGACAACGU | 4192 | ACGUUGUCAGUAACGCCCU |
| siRNA 1295 | 1295 | GGGCGUUACUGACAACGUG | 4193 | CACGUUGUCAGUAACGCCC |
| siRNA 1296 | 1296 | GGCGUUACUGACAACGUGG | 4194 | CCACGUUGUCAGUAACGCC |
| siRNA 1297 | 1297 | GCGUUACUGACAACGUGGU | 4195 | ACCACGUUGUCAGUAACGC |
| siRNA 1298 | 1298 | CGUUACUGACAACGUGGUG | 4196 | CACCACGUUGUCAGUAACG |
| siRNA 1299 | 1299 | GUUACUGACAACGUGGUGG | 4197 | CCACCACGUUGUCAGUAAC |
| siRNA 1300 | 1300 | UUACUGACAACGUGGUGGA | 4198 | UCCACCACGUUGUCAGUAA |
| siRNA 1301 | 1301 | UACUGACAACGUGGUGGAC | 4199 | GUCCACCACGUUGUCAGUA |
| siRNA 1302 | 1302 | ACUGACAACGUGGUGGACA | 4200 | UGUCCACCACGUUGUCAGU |
| SiRNA 1303 | 1303 | CUGACAACGUGGUGGACAC | 4201 | GUGUCCACCACGUUGUCAG |
| siRNA 1304 | 1304 | UGACAACGUGGUGGACACA | 4202 | UGUGUCCACCACGUUGUCA |
| siRNA 1305 | 1305 | GACAACGUGGUGGACACAG | 4203 | CUGUGUCCACCACGUUGUC |
| siRNA 1306 | 1306 | ACAACGUGGUGGACACAGU | 4204 | ACUGUGUCCACCACGUUGU |
| siRNA 1307 | 1307 | CAACGUGGUGGACACAGUG | 4205 | CACUGUGUCCACCACGUUG |
| siRNA 1308 | 1308 | AACGUGGUGGACACAGUGG | 4206 | CCACUGUGUCCACCACGUU |
| siRNA 1309 | 1309 | ACGUGGUGGACACAGUGGU | 4207 | ACCACUGUGUCCACCACGU |
| siRNA 1310 | 1310 | CGUGGUGGACACAGUGGUG | 4208 | CACCACUGUGUCCACCACG |
| siRNA 1311 | 1311 | GUGGUGGACACAGUGGUGC | 4209 | GCACCACUGUGUCCACCAC |
| siRNA 1312 | 1312 | UGGUGGACACAGUGGUGCA | 4210 | UGCACCACUGUGUCCACCA |
| siRNA 1313 | 1313 | GGUGGACACAGUGGUGCAU | 4211 | AUGCACCACUGUGUCCACC |
| siRNA 1314 | 1314 | GUGGACACAGUGGUGCAUU | 4212 | AAUGCACCACUGUGUCCAC |
| siRNA 1315 | 1315 | UGGACACAGUGGUGCAUUA | 4213 | UAAUGCACCACUGUGUCCA |
| siRNA 1316 | 1316 | GGACACAGUGGUGCAUUAC | 4214 | GUAAUGCACCACUGUGUCC |
| siRNA 1317 | 1317 | GACACAGUGGUGCAUUACG | 4215 | CGUAAUGCACCACUGUGUC |
| siRNA 1318 | 1318 | ACACAGUGGUGCAUUACGU | 4216 | ACGUAAUGCACCACUGUGU |
| siRNA 1319 | 1319 | CACAGUGGUGCAUUACGUG | 4217 | CACGUAAUGCACCACUGUG |
| siRNA 1320 | 1320 | ACAGUGGUGCAUUACGUGC | 4218 | GCACGUAAUGCACCACUGU |
| siRNA 1321 | 1321 | CAGUGGUGCAUUACGUGCC | 4219 | GGCACGUAAUGCACCACUG |
| siRNA 1322 | 1322 | AGUGGUGCAUUACGUGCCG | 4220 | CGGCACGUAAUGCACCACU |
| siRNA 1323 | 1323 | GUGGUGCAUUACGUGCCGC | 4221 | GCGGCACGUAAUGCACCAC |
| siRNA 1324 | 1324 | UGGUGCAUUACGUGCCGCU | 4222 | AGCGGCACGUAAUGCACCA |
| siRNA 1325 | 1325 | GGUGCAUUACGUGCCGCUC | 4223 | GAGCGGCACGUAAUGCACC |
| siRNA 1326 | 1326 | GUGCAUUACGUGCCGCUCC | 4224 | GGAGCGGCACGUAAUGCAC |
| siRNA 1327 | 1327 | UGCAUUACGUGCCGCUCCC | 4225 | GGGAGCGGCACGUAAUGCA |
| siRNA 1328 | 1328 | GCAUUACGUGCCGCUCCCC | 4226 | GGGGAGCGGCACGUAAUGC |
| siRNA 1329 | 1329 | CAUUACGUGCCGCUCCCCA | 4227 | UGGGGAGCGGCACGUAAUG |
| siRNA 1330 | 1330 | AUUACGUGCCGCUCCCCAG | 4228 | CUGGGGAGCGGCACGUAAU |
| siRNA 1331 | 1331 | UUACGUGCCGCUCCCCAGG | 4229 | CCUGGGGAGCGGCACGUAA |
| siRNA 1332 | 1332 | UACGUGCCGCUCCCCAGGC | 4230 | GCCUGGGGAGCGGCACGUA |
| siRNA 1333 | 1333 | ACGUGCCGCUCCCCAGGCU | 4231 | AGCCUGGGGAGCGGCACGU |
| siRNA 1334 | 1334 | CGUGCCGCUCCCCAGGCUG | 4232 | CAGCCUGGGGAGCGGCACG |
| siRNA 1335 | 1335 | GUGCCGCUCCCCAGGCUGU | 4233 | ACAGCCUGGGGAGCGGCAC |
| siRNA 1336 | 1336 | UGCCGCUCCCCAGGCUGUC | 4234 | GACAGCCUGGGGAGCGGCA |
| siRNA 1337 | 1337 | GCCGCUCCCCAGGCUGUCG | 4235 | CGACAGCCUGGGGAGCGGC |
| siRNA 1338 | 1338 | CCGCUCCCCAGGCUGUCGC | 4236 | GCGACAGCCUGGGGAGCGG |
| siRNA 1339 | 1339 | CGCUCCCCAGGCUGUCGCU | 4237 | AGCGACAGCCUGGGGAGCG |
| siRNA 1340 | 1340 | GCUCCCCAGGCUGUCGCUG | 4238 | CAGCGACAGCCUGGGGAGC |
| siRNA 1341 | 1341 | CUCCCCAGGCUGUCGCUGA | 4239 | UCAGCGACAGCCUGGGGAG |
| siRNA 1342 | 1342 | UCCCCAGGCUGUCGCUGAU | 4240 | AUCAGCGACAGCCUGGGGA |
| siRNA 1343 | 1343 | CCCCAGGCUGUCGCUGAUG | 4241 | CAUCAGCGACAGCCUGGGG |
| siRNA 1344 | 1344 | CCCAGGCUGUCGCUGAUGG | 4242 | CCAUCAGCGACAGCCUGGG |
| siRNA 1345 | 1345 | CCAGGCUGUCGCUGAUGGA | 4243 | UCCAUCAGCGACAGCCUGG |
| siRNA 1346 | 1346 | CAGGCUGUCGCUGAUGGAG | 4244 | CUCCAUCAGCGACAGCCUG |
| siRNA 1347 | 1347 | AGGCUGUCGCUGAUGGAGC | 4245 | GCUCCAUCAGCGACAGCCU |
| siRNA 1348 | 1348 | GGCUGUCGCUGAUGGAGCC | 4246 | GGCUCCAUCAGCGACAGCC |
| siRNA 1349 | 1349 | GCUGUCGCUGAUGGAGCCC | 4247 | GGGCUCCAUCAGCGACAGC |
| siRNA 1350 | 1350 | CUGUCGCUGAUGGAGCCCG | 4248 | CGGGCUCCAUCAGCGACAG |
| siRNA 1351 | 1351 | UGUCGCUGAUGGAGCCCGA | 4249 | UCGGGCUCCAUCAGCGACA |
| siRNA 1352 | 1352 | GUCGCUGAUGGAGCCCGAG | 4250 | CUCGGGCUCCAUCAGCGAC |
| siRNA 1353 | 1353 | UCGCUGAUGGAGCCCGAGA | 4251 | UCUCGGGCUCCAUCAGCGA |
| siRNA 1354 | 1354 | CGCUGAUGGAGCCCGAGAG | 4252 | CUCUCGGGCUCCAUCAGCG |
| siRNA 1355 | 1355 | GCUGAUGGAGCCCGAGAGC | 4253 | GCUCUCGGGCUCCAUCAGC |
| siRNA 1356 | 1356 | CUGAUGGAGCCCGAGAGCG | 4254 | CGCUCUCGGGCUCCAUCAG |
| siRNA 1357 | 1357 | UGAUGGAGCCCGAGAGCGA | 4255 | UCGCUCUCGGGCUCCAUCA |
| siRNA 1358 | 1358 | GAUGGAGCCCGAGAGCGAA | 4256 | UUCGCUCUCGGGCUCCAUC |
| siRNA 1359 | 1359 | AUGGAGCCCGAGAGCGAAU | 4257 | AUUCGCUCUCGGGCUCCAU |
| siRNA 1360 | 1360 | UGGAGCCCGAGAGCGAAUU | 4258 | AAUUCGCUCUCGGGCUCCA |
| siRNA 1361 | 1361 | GGAGCCCGAGAGCGAAUUC | 4259 | GAAUUCGCUCUCGGGCUCC |
| siRNA 1362 | 1362 | GAGCCCGAGAGCGAAUUCC | 4260 | GGAAUUCGCUCUCGGGCUC |
| siRNA 1363 | 1363 | AGCCCGAGAGCGAAUUCCG | 4261 | CGGAAUUCGCUCUCGGGCU |
| siRNA 1364 | 1364 | GCCCGAGAGCGAAUUCCGG | 4262 | CCGGAAUUCGCUCUCGGGC |
| siRNA 1365 | 1365 | CCCGAGAGCGAAUUCCGGG | 4263 | CCCGGAAUUCGCUCUCGGG |
| siRNA 1366 | 1366 | CCGAGAGCGAAUUCCGGGA | 4264 | UCCCGGAAUUCGCUCUCGG |
| siRNA 1367 | 1367 | CGAGAGCGAAUUCCGGGAC | 4265 | GUCCCGGAAUUCGCUCUCG |
| siRNA 1368 | 1368 | GAGAGCGAAUUCCGGGACA | 4266 | UGUCCCGGAAUUCGCUCUC |
| siRNA 1369 | 1369 | AGAGCGAAUUCCGGGACAU | 4267 | AUGUCCCGGAAUUCGCUCU |
| siRNA 1370 | 1370 | GAGCGAAUUCCGGGACAUC | 4268 | GAUGUCCCGGAAUUCGCUC |
| siRNA 1371 | 1371 | AGCGAAUUCCGGGACAUCG | 4269 | CGAUGUCCCGGAAUUCGCU |
| siRNA 1372 | 1372 | GCGAAUUCCGGGACAUCGA | 4270 | UCGAUGUCCCGGAAUUCGC |
| siRNA 1373 | 1373 | CGAAUUCCGGGACAUCGAC | 4271 | GUCGAUGUCCCGGAAUUCG |
| siRNA 1374 | 1374 | GAAUUCCGGGACAUCGACA | 4272 | UGUCGAUGUCCCGGAAUUC |
| siRNA 1375 | 1375 | AAUUCCGGGACAUCGACAA | 4273 | UUGUCGAUGUCCCGGAAUU |
| siRNA 376 | 1376 | AUUCCGGGACAUCGACAAC | 4274 | GUUGUCGAUGUCCCGGAAU |
| siRNA 1377 | 1377 | UUCCGGGACAUCGACAACC | 4275 | GGUUGUCGAUGUCCCGGAA |
| siRNA 1378 | 1378 | UCCGGGACAUCGACAACCC | 4276 | GGGUUGUCGAUGUCCCGGA |
| siRNA 1379 | 1379 | CCGGGACAUCGACAACCCA | 4277 | UGGGUUGUCGAUGUCCCGG |
| siRNA 1380 | 1380 | CGGGACAUCGACAACCCAC | 4278 | GUGGGUUGUCGAUGUCCCG |
| siRNA 1381 | 1381 | GGGACAUCGACAACCCACC | 4279 | GGUGGGUUGUCGAUGUCCC |
| siRNA 1382 | 1382 | GGACAUCGACAACCCACCA | 4280 | UGGUGGGUUGUCGAUGUCC |
| siRNA 1383 | 1383 | GACAUCGACAACCCACCAG | 4281 | CUGGUGGGUUGUCGAUGUC |
| siRNA 1384 | 1384 | ACAUCGACAACCCACCAGC | 4282 | GCUGGUGGGUUGUCGAUGU |
| siRNA 1385 | 1385 | CAUCGACAACCCACCAGCC | 4283 | GGCUGGUGGGUUGUCGAUG |
| siRNA 1386 | 1386 | AUCGACAACCCACCAGCCG | 4284 | CGGCUGGUGGGUUGUCGAU |
| siRNA 1387 | 1387 | UCGACAACCCACCAGCCGA | 4285 | UCGGCUGGUGGGUUGUCGA |
| siRNA 1388 | 1388 | CGACAACCCACCAGCCGAG | 4286 | CUCGGCUGGUGGGUUGUCG |
| siRNA 1389 | 1389 | GACAACCCACCAGCCGAGG | 4287 | CCUCGGCUGGUGGGUUGUC |
| siRNA 1390 | 1390 | ACAACCCACCAGCCGAGGU | 4288 | ACCUCGGCUGGUGGGUUGU |
| siRNA 1391 | 1391 | CAACCCACCAGCCGAGGUC | 4289 | GACCUCGGCUGGUGGGUUG |
| siRNA 1392 | 1392 | AACCCACCAGCCGAGGUCG | 4290 | CGACCUCGGCUGGUGGGUU |
| siRNA 1393 | 1393 | ACCCACCAGCCGAGGUCGA | 4291 | UCGACCUCGGCUGGUGGGU |
| siRNA 1394 | 1394 | CCCACCAGCCGAGGUCGAG | 4292 | CUCGACCUCGGCUGGUGGG |
| siRNA 1395 | 1395 | CCACCAGCCGAGGUCGAGC | 4293 | GCUCGACCUCGGCUGGUGG |
| siRNA 1396 | 1396 | CACCAGCCGAGGUCGAGCG | 4294 | CGCUCGACCUCGGCUGGUG |
| siRNA 1397 | 1397 | ACCAGCCGAGGUCGAGCGC | 4295 | GCGCUCGACCUCGGCUGGU |
| siRNA 1398 | 1398 | CCAGCCGAGGUCGAGCGCC | 4296 | GGCGCUCGACCUCGGCUGG |
| siRNA 1399 | 1399 | CAGCCGAGGUCGAGCGCCG | 4297 | CGGCGCUCGACCUCGGCUG |
| siRNA 1400 | 1400 | AGCCGAGGUCGAGCGCCGG | 4298 | CCGGCGCUCGACCUCGGCU |
| siRNA 1401 | 1401 | GCCGAGGUCGAGCGCCGGG | 4299 | CCCGGCGCUCGACCUCGGC |
| siRNA 1402 | 1402 | CCGAGGUCGAGCGCCGGGA | 4300 | UCCCGGCGCUCGACCUCGG |
| siRNA 1403 | 1403 | CGAGGUCGAGCGCCGGGAG | 4301 | CUCCCGGCGCUCGACCUCG |
| siRNA 1404 | 1404 | GAGGUCGAGCGCCGGGAGG | 4302 | CCUCCCGGCGCUCGACCUC |
| siRNA 1405 | 1405 | AGGUCGAGCGCCGGGAGGC | 4303 | GCCUCCCGGCGCUCGACCU |
| siRNA 1406 | 1406 | GGUCGAGCGCCGGGAGGCG | 4304 | CGCCUCCCGGCGCUCGACC |
| siRNA 1407 | 1407 | GUCGAGCGCCGGGAGGCGG | 4305 | CCGCCUCCCGGCGCUCGAC |
| siRNA 1408 | 1408 | UCGAGCGCCGGGAGGCGGA | 4306 | UCCGCCUCCCGGCGCUCGA |
| siRNA 1409 | 1409 | CGAGCGCCGGGAGGCGGAG | 4307 | CUCCGCCUCCCGGCGCUCG |
| siRNA 1410 | 1410 | GAGCGCCGGGAGGCGGAGC | 4308 | GCUCCGCCUCCCGGCGCUC |
| siRNA 1411 | 1411 | AGCGCCGGGAGGCGGAGCG | 4309 | CGCUCCGCCUCCCGGCGCU |
| siRNA 1412 | 1412 | GCGCCGGGAGGCGGAGCGC | 4310 | GCGCUCCGCCUCCCGGCGC |
| siRNA 1413 | 1413 | CGCCGGGAGGCGGAGCGCA | 4311 | UGCGCUCCGCCUCCCGGCG |
| siRNA 1414 | 1414 | GCCGGGAGGCGGAGCGCAG | 4312 | CUGCGCUCCGCCUCCCGGC |
| siRNA 1415 | 1415 | CCGGGAGGCGGAGCGCAGA | 4313 | UCUGCGCUCCGCCUCCCGG |
| siRNA 1416 | 1416 | CGGGAGGCGGAGCGCAGAG | 4314 | CUCUGCGCUCCGCCUCCCG |
| siRNA 1417 | 1417 | GGGAGGCGGAGCGCAGAGC | 4315 | GCUCUGCGCUCCGCCUCCC |
| siRNA 1418 | 1418 | GGAGGCGGAGCGCAGAGCG | 4316 | CGCUCUGCGCUCCGCCUCC |
| siRNA 1419 | 1419 | GAGGCGGAGCGCAGAGCGU | 4317 | ACGCUCUGCGCUCCGCCUC |
| siRNA 1420 | 1420 | AGGCGGAGCGCAGAGCGUC | 4318 | GACGCUCUGCGCUCCGCCU |
| siRNA 1421 | 1421 | GGCGGAGCGCAGAGCGUCU | 4319 | AGACGCUCUGCGCUCCGCC |
| siRNA 1422 | 1422 | GCGGAGCGCAGAGCGUCUG | 4320 | CAGACGCUCUGCGCUCCGC |
| siRNA 1423 | 1423 | CGGAGCGCAGAGCGUCUGG | 4321 | CCAGACGCUCUGCGCUCCG |
| siRNA 1424 | 1424 | GGAGCGCAGAGCGUCUGGG | 4322 | CCCAGACGCUCUGCGCUCC |
| siRNA 1425 | 1425 | GAGCGCAGAGCGUCUGGGG | 4323 | CCCCAGACGCUCUGCGCUC |
| siRNA 1426 | 1426 | AGCGCAGAGCGUCUGGGGC | 4324 | GCCCCAGACGCUCUGCGCU |
| siRNA 1427 | 1427 | GCGCAGAGCGUCUGGGGCG | 4325 | CGCCCCAGACGCUCUGCGC |
| siRNA 1428 | 1428 | CGCAGAGCGUCUGGGGCGC | 4326 | GCGCCCCAGACGCUCUGCG |
| siRNA 1429 | 1429 | GCAGAGCGUCUGGGGCGCC | 4327 | GGCGCCCCAGACGCUCUGC |
| siRNA 1430 | 1430 | CAGAGCGUCUGGGGCGCCG | 4328 | CGGCGCCCCAGACGCUCUG |
| siRNA 1431 | 1431 | AGAGCGUCUGGGGCGCCGU | 4329 | ACGGCGCCCCAGACGCUCU |
| siRNA 1432 | 1432 | GAGCGUCUGGGGCGCCGUC | 4330 | GACGGCGCCCCAGACGCUC |
| siRNA 1433 | 1433 | AGCGUCUGGGGCGCCGUCC | 4331 | GGACGGCGCCCCAGACGCU |
| siRNA 1434 | 1434 | GCGUCUGGGGCGCCGUCCG | 4332 | CGGACGGCGCCCCAGACGC |
| siRNA 1435 | 1435 | CGUCUGGGGCGCCGUCCGC | 4333 | GCGGACGGCGCCCCAGACG |
| siRNA 1436 | 1436 | GUCUGGGGCGCCGUCCGCC | 4334 | GGCGGACGGCGCCCCAGAC |
| siRNA 1437 | 1437 | UCUGGGGCGCCGUCCGCCG | 4335 | CGGCGGACGGCGCCCCAGA |
| siRNA 1438 | 1438 | CUGGGGCGCCGUCCGCCGG | 4336 | CCGGCGGACGGCGCCCCAG |
| siRNA 1439 | 1439 | UGGGGCGCCGUCCGCCGGC | 4337 | GCCGGCGGACGGCGCCCCA |
| siRNA 1440 | 1440 | GGGGCGCCGUCCGCCGGCC | 4338 | GGCCGGCGGACGGCGCCCC |
| siRNA 1441 | 1441 | GGGCGCCGUCCGCCGGCCC | 4339 | GGGCCGGCGGACGGCGCCC |
| siRNA 1442 | 1442 | GGCGCCGUCCGCCGGCCCG | 4340 | CGGGCCGGCGGACGGCGCC |
| siRNA 1443 | 1443 | GCGCCGUCCGCCGGCCCGG | 4341 | CCGGGCCGGCGGACGGCGC |
| siRNA 1444 | 1444 | CGCCGUCCGCCGGCCCGGA | 4342 | UCCGGGCCGGCGGACGGCG |
| siRNA 1445 | 1445 | GCCGUCCGCCGGCCCGGAG | 4343 | CUCCGGGCCGGCGGACGGC |
| siRNA 1446 | 1446 | CCGUCCGCCGGCCCGGAGC | 4344 | GCUCCGGGCCGGCGGACGG |
| siRNA 1447 | 1447 | CGUCCGCCGGCCCGGAGCC | 4345 | GGCUCCGGGCCGGCGGACG |
| siRNA 1448 | 1448 | GUCCGCCGGCCCGGAGCCC | 4346 | GGGCUCCGGGCCGGCGGAC |
| siRNA 1449 | 1449 | UCCGCCGGCCCGGAGCCCG | 4347 | CGGGCUCCGGGCCGGCGGA |
| siRNA 1450 | 1450 | CCGCCGGCCCGGAGCCCGC | 4348 | GCGGGCUCCGGGCCGGCGG |
| siRNA 1451 | 1451 | CGCCGGCCCGGAGCCCGCC | 4349 | GGCGGGCUCCGGGCCGGCG |
| siRNA 1452 | 1452 | GCCGGCCCGGAGCCCGCCC | 4350 | GGGCGGGCUCCGGGCCGGC |
| siRNA 1453 | 1453 | CCGGCCCGGAGCCCGCCCC | 4351 | GGGGCGGGCUCCGGGCCGG |
| siRNA 1454 | 1454 | CGGCCCGGAGCCCGCCCCG | 4352 | CGGGGGGGGCUCCGGGCCG |
| siRNA 1455 | 1455 | GGCCCGGAGCCCGCCCCGC | 4353 | GCGGGGGGGGCUCCGGGCC |
| siRNA 1456 | 1456 | GCCCGGAGCCCGCCCCGCG | 4354 | CGCGGGGGGGGCUCCGGGC |
| siRNA 1457 | 1457 | CCCGGAGCCCGCCCCGCGU | 4355 | ACGCGGGGGGGGCUCCGGG |
| siRNA 1458 | 1458 | CCGGAGCCCGCCCCGCGUC | 4356 | GACGCGGGGGGGGCUCCGG |
| siRNA 1459 | 1459 | CGGAGCCCGCCCCGCGUCU | 4357 | AGACGCGGGGGGGGCUCCG |
| siRNA 1460 | 1460 | GGAGCCCGCCCCGCGUCUC | 4358 | GAGACGCGGGGGGGGCUCC |
| siRNA 1461 | 1461 | GAGCCCGCCCCGCGUCUCG | 4359 | CGAGACGCGGGGGGGGCUC |
| siRNA 1462 | 1462 | AGCCCGCCCCGCGUCUCGC | 4360 | GCGAGACGCGGGGCGGGCU |
| siRNA 1463 | 1463 | GCCCGCCCCGCGUCUCGCA | 4361 | UGCGAGACGCGGGGGGGGC |
| siRNA 1464 | 1464 | CCCGCCCCGCGUCUCGCAC | 4362 | GUGCGAGACGCGGGGCGGG |
| siRNA 1465 | 1465 | CCGCCCCGCGUCUCGCACA | 4363 | UGUGCGAGACGCGGGGCGG |
| siRNA 1466 | 1466 | CGCCCCGCGUCUCGCACAG | 4364 | CUGUGCGAGACGCGGGGCG |
| siRNA 1467 | 1467 | GCCCCGCGUCUCGCACAGC | 4365 | GCUGUGCGAGACGCGGGGC |
| siRNA 1468 | 1468 | CCCCGCGUCUCGCACAGCC | 4366 | GGCUGUGCGAGACGCGGGG |
| siRNA 1469 | 1469 | CCCGCGUCUCGCACAGCCC | 4367 | GGGCUGUGCGAGACGCGGG |
| siRNA 1470 | 1470 | CCGCGUCUCGCACAGCCCC | 4368 | GGGGCUGUGCGAGACGCGG |
| siRNA 1471 | 1471 | CGCGUCUCGCACAGCCCCG | 4369 | CGGGGCUGUGCGAGACGCG |
| siRNA 1472 | 1472 | GCGUCUCGCACAGCCCCGC | 4370 | GCGGGGCUGUGCGAGACGC |
| siRNA 1473 | 1473 | CGUCUCGCACAGCCCCGCC | 4371 | GGCGGGGCUGUGCGAGACG |
| siRNA 1474 | 1474 | GUCUCGCACAGCCCCGCCG | 4372 | CGGCGGGGCUGUGCGAGAC |
| siRNA 1475 | 1475 | UCUCGCACAGCCCCGCCGC | 4373 | GCGGCGGGGCUGUGCGAGA |
| siRNA 1476 | 1476 | CUCGCACAGCCCCGCCGCA | 4374 | UGCGGCGGGGCUGUGCGAG |
| siRNA 1477 | 1477 | UCGCACAGCCCCGCCGCAG | 4375 | CUGCGGCGGGGCUGUGCGA |
| siRNA 1478 | 1478 | CGCACAGCCCCGCCGCAGC | 4376 | GCUGCGGCGGGGCUGUGCG |
| siRNA 1479 | 1479 | GCACAGCCCCGCCGCAGCC | 4377 | GGCUGCGGCGGGGCUGUGC |
| siRNA 1480 | 1480 | CACAGCCCCGCCGCAGCCU | 4378 | AGGCUGCGGCGGGGCUGUG |
| siRNA 1481 | 1481 | ACAGCCCCGCCGCAGCCUG | 4379 | CAGGCUGCGGCGGGGCUGU |
| siRNA 1482 | 1482 | CAGCCCCGCCGCAGCCUGC | 4380 | GCAGGCUGCGGCGGGGCUG |
| siRNA 1483 | 1483 | AGCCCCGCCGCAGCCUGCG | 4381 | CGCAGGCUGCGGCGGGGCU |
| siRNA 1484 | 1484 | GCCCCGCCGCAGCCUGCGC | 4382 | GCGCAGGCUGCGGCGGGGC |
| siRNA 1485 | 1485 | CCCCGCCGCAGCCUGCGCA | 4383 | UGCGCAGGCUGCGGCGGGG |
| siRNA 1486 | 1486 | CCCGCCGCAGCCUGCGCAG | 4384 | CUGCGCAGGCUGCGGCGGG |
| siRNA 1487 | 1487 | CCGCCGCAGCCUGCGCAGC | 4385 | GCUGCGCAGGCUGCGGCGG |
| siRNA 1488 | 1488 | CGCCGCAGCCUGCGCAGCG | 4386 | CGCUGCGCAGGCUGCGGCG |
| siRNA 1489 | 1489 | GCCGCAGCCUGCGCAGCGC | 4387 | GCGCUGCGCAGGCUGCGGC |
| siRNA 1490 | 1490 | CCGCAGCCUGCGCAGCGCG | 4388 | CGCGCUGCGCAGGCUGCGG |
| siRNA 1491 | 1491 | CGCAGCCUGCGCAGCGCGC | 4389 | GCGCGCUGCGCAGGCUGCG |
| siRNA 1492 | 1492 | GCAGCCUGCGCAGCGCGCA | 4390 | UGCGCGCUGCGCAGGCUGC |
| siRNA 1493 | 1493 | CAGCCUGCGCAGCGCGCAG | 4391 | CUGCGCGCUGCGCAGGCUG |
| siRNA 1494 | 1494 | AGCCUGCGCAGCGCGCAGA | 4392 | UCUGCGCGCUGCGCAGGCU |
| siRNA 1495 | 1495 | GCCUGCGCAGCGCGCAGAG | 4393 | CUCUGCGCGCUGCGCAGGC |
| siRNA 1496 | 1496 | CCUGCGCAGCGCGCAGAGC | 4394 | GCUCUGCGCGCUGCGCAGG |
| siRNA 1497 | 1497 | CUGCGCAGCGCGCAGAGCC | 4395 | GGCUCUGCGCGCUGCGCAG |
| siRNA 1498 | 1498 | UGCGCAGCGCGCAGAGCCC | 4396 | GGGCUCUGCGCGCUGCGCA |
| siRNA 1499 | 1499 | GCGCAGCGCGCAGAGCCCC | 4397 | GGGGCUCUGCGCGCUGCGC |
| siRNA 1500 | 1500 | CGCAGCGCGCAGAGCCCCG | 4398 | CGGGGCUCUGCGCGCUGCG |
| siRNA 1501 | 1501 | GCAGCGCGCAGAGCCCCGG | 4399 | CCGGGGCUCUGCGCGCUGC |
| siRNA 1502 | 1502 | CAGCGCGCAGAGCCCCGGC | 4400 | GCCGGGGCUCUGCGCGCUG |
| siRNA 1503 | 1503 | AGCGCGCAGAGCCCCGGCG | 4401 | CGCCGGGGCUCUGCGCGCU |
| SiRNA 1504 | 1504 | GCGCGCAGAGCCCCGGCGC | 4402 | GCGCCGGGGCUCUGCGCGC |
| siRNA 1505 | 1505 | CGCGCAGAGCCCCGGCGCG | 4403 | CGCGCCGGGGCUCUGCGCG |
| siRNA 1506 | 1506 | GCGCAGAGCCCCGGCGCGC | 4404 | GCGCGCCGGGGCUCUGCGC |
| siRNA 1507 | 1507 | CGCAGAGCCCCGGCGCGCC | 4405 | GGCGCGCCGGGGCUCUGCG |
| siRNA 1508 | 1508 | GCAGAGCCCCGGCGCGCCC | 4406 | GGGCGCGCCGGGGCUCUGC |
| siRNA 1509 | 1509 | CAGAGCCCCGGCGCGCCCC | 4407 | GGGGCGCGCCGGGGCUCUG |
| siRNA 1510 | 1510 | AGAGCCCCGGCGCGCCCCC | 4408 | GGGGGCGCGCCGGGGCUCU |
| siRNA 1511 | 1511 | GAGCCCCGGCGCGCCCCCC | 4409 | GGGGGGCGCGCCGGGGCUC |
| siRNA 1512 | 1512 | AGCCCCGGCGCGCCCCCCG | 4410 | CGGGGGGCGCGCCGGGGCU |
| siRNA 1513 | 1513 | GCCCCGGCGCGCCCCCGG | 4411 | CCGGGGGGCGCGCCGGGGC |
| siRNA 1514 | 1514 | CCCCGGCGCGCCCCCCGGC | 4412 | GCCGGGGGGCGCGCCGGGG |
| siRNA 1515 | 1515 | CCCGGCGCGCCCCCCGGCC | 4413 | GGCCGGGGGGCGCGCCGGG |
| siRNA 1516 | 1516 | CCGGCGCGCCCCCCGGCCC | 4414 | GGGCCGGGGGGCGCGCCGG |
| siRNA 1517 | 1517 | CGGCGCGCCCCCCGGCCCG | 4415 | CGGGCCGGGGGGCGCGCCG |
| siRNA 1518 | 1518 | GGCGCGCCCCCCGGCCCGG | 4416 | CCGGGCCGGGGGGCGCGCC |
| siRNA 1519 | 1519 | GCGCGCCCCCCGGCCCGGG | 4417 | CCCGGGCCGGGGGGCGCGC |
| siRNA 1520 | 1520 | CGCGCCCCCCGGCCCGGGC | 4418 | GCCCGGGCCGGGGGGCGCG |
| siRNA 1521 | 1521 | GCGCCCCCCGGCCCGGGCC | 4419 | GGCCCGGGCCGGGGGGCGC |
| siRNA 1522 | 1522 | CGCCCCCCGGCCCGGGCCU | 4420 | AGGCCCGGGCCGGGGGGCG |
| siRNA 1523 | 1523 | GCCCCCCGGCCCGGGCCUG | 4421 | CAGGCCCGGGCCGGGGGGC |
| siRNA 1524 | 1524 | CCCCCCGGCCCGGGCCUGG | 4422 | CCAGGCCCGGGCCGGGGGG |
| siRNA 1525 | 1525 | CCCCCGGCCCGGGCCUGGA | 4423 | UCCAGGCCCGGGCCGGGGG |
| siRNA 1526 | 1526 | CCCCGGCCCGGGCCUGGAG | 4424 | CUCCAGGCCCGGGCCGGGG |
| siRNA 1527 | 1527 | CCCGGCCCGGGCCUGGAGG | 4425 | CCUCCAGGCCCGGGCCGGG |
| siRNA 1528 | 1528 | CCGGCCCGGGCCUGGAGGA | 4426 | UCCUCCAGGCCCGGGCCGG |
| siRNA 1529 | 1529 | CGGCCCGGGCCUGGAGGAC | 4427 | GUCCUCCAGGCCCGGGCCG |
| siRNA 1530 | 1530 | GGCCCGGGCCUGGAGGACG | 4428 | CGUCCUCCAGGCCCGGGCC |
| siRNA 1531 | 1531 | GCCCGGGCCUGGAGGACGA | 4429 | UCGUCCUCCAGGCCCGGGC |
| siRNA 1532 | 1532 | CCCGGGCCUGGAGGACGAA | 4430 | UUCGUCCUCCAGGCCCGGG |
| siRNA 1533 | 1533 | CCGGGCCUGGAGGACGAAG | 4431 | CUUCGUCCUCCAGGCCCGG |
| siRNA 1534 | 1534 | CGGGCCUGGAGGACGAAGU | 4432 | ACUUCGUCCUCCAGGCCCG |
| siRNA 1535 | 1535 | GGGCCUGGAGGACGAAGUC | 4433 | GACUUCGUCCUCCAGGCCC |
| siRNA 1536 | 1536 | GGCCUGGAGGACGAAGUCG | 4434 | CGACUUCGUCCUCCAGGCC |
| siRNA 1537 | 1537 | GCCUGGAGGACGAAGUCGC | 4435 | GCGACUUCGUCCUCCAGGC |
| siRNA 1538 | 1538 | CCUGGAGGACGAAGUCGCC | 4436 | GGCGACUUCGUCCUCCAGG |
| siRNA 1539 | 1539 | CUGGAGGACGAAGUCGCCA | 4437 | UGGCGACUUCGUCCUCCAG |
| siRNA 1540 | 1540 | UGGAGGACGAAGUCGCCAC | 4438 | GUGGCGACUUCGUCCUCCA |
| siRNA 1541 | 1541 | GGAGGACGAAGUCGCCACG | 4439 | CGUGGCGACUUCGUCCUCC |
| siRNA 1542 | 1542 | GAGGACGAAGUCGCCACGC | 4440 | GCGUGGCGACUUCGUCCUC |
| siRNA 1543 | 1543 | AGGACGAAGUCGCCACGCC | 4441 | GGCGUGGCGACUUCGUCCU |
| siRNA 1544 | 1544 | GGACGAAGUCGCCACGCCC | 4442 | GGGCGUGGCGACUUCGUCC |
| siRNA 1545 | 1545 | GACGAAGUCGCCACGCCCG | 4443 | CGGGCGUGGCGACUUCGUC |
| siRNA 1546 | 1546 | ACGAAGUCGCCACGCCCGC | 4444 | GCGGGCGUGGCGACUUCGU |
| siRNA 1547 | 1547 | CGAAGUCGCCACGCCCGCA | 4445 | UGCGGGCGUGGCGACUUCG |
| siRNA 1548 | 1548 | GAAGUCGCCACGCCCGCAG | 4446 | CUGCGGGCGUGGCGACUUC |
| siRNA 1549 | 1549 | AAGUCGCCACGCCCGCAGC | 4447 | GCUGCGGGCGUGGCGACUU |
| siRNA 1550 | 1550 | AGUCGCCACGCCCGCAGCG | 4448 | CGCUGCGGGCGUGGCGACU |
| siRNA 1551 | 1551 | GUCGCCACGCCCGCAGCGC | 4449 | GCGCUGCGGGCGUGGCGAC |
| siRNA 1552 | 1552 | UCGCCACGCCCGCAGCGCC | 4450 | GGCGCUGCGGGCGUGGCGA |
| siRNA 1553 | 1553 | CGCCACGCCCGCAGCGCCG | 4451 | CGGCGCUGCGGGCGUGGCG |
| siRNA 1554 | 1554 | GCCACGCCCGCAGCGCCGC | 4452 | GCGGCGCUGCGGGCGUGGC |
| siRNA 1555 | 1555 | CCACGCCCGCAGCGCCGCG | 4453 | CGCGGCGCUGCGGGCGUGG |
| siRNA 1556 | 1556 | CACGCCCGCAGCGCCGCGC | 4454 | GCGCGGCGCUGCGGGCGUG |
| siRNA 1557 | 1557 | ACGCCCGCAGCGCCGCGCC | 4455 | GGCGCGGCGCUGCGGGCGU |
| siRNA 1558 | 1558 | CGCCCGCAGCGCCGCGCCC | 4456 | GGGCGCGGCGCUGCGGGCG |
| siRNA 1559 | 1559 | GCCCGCAGCGCCGCGCCCG | 4457 | CGGGCGCGGCGCUGCGGGC |
| SIRNA 1560 | 1560 | CCCGCAGCGCCGCGCCCGG | 4458 | CCGGGCGCGGCGCUGCGGG |
| siRNA 1561 | 1561 | CCGCAGCGCCGCGCCCGGG | 4459 | CCCGGGCGCGGCGCUGCGG |
| siRNA 1562 | 1562 | CGCAGCGCCGCGCCCGGGC | 4460 | GCCCGGGCGCGGCGCUGCG |
| siRNA 1563 | 1563 | GCAGCGCCGCGCCCGGGCU | 4461 | AGCCCGGGCGCGGCGCUGC |
| siRNA 1564 | 1564 | CAGCGCCGCGCCCGGGCUU | 4462 | AAGCCCGGGCGCGGCGCUG |
| siRNA 1565 | 1565 | AGCGCCGCGCCCGGGCUUC | 4463 | GAAGCCCGGGCGCGGCGCU |
| siRNA 1566 | 1566 | GCGCCGCGCCCGGGCUUCC | 4464 | GGAAGCCCGGGCGCGGCGC |
| siRNA 1567 | 1567 | CGCCGCGCCCGGGCUUCCC | 4465 | GGGAAGCCCGGGCGCGGCG |
| siRNA 1568 | 1568 | GCCGCGCCCGGGCUUCCCG | 4466 | CGGGAAGCCCGGGCGCGGC |
| siRNA 1569 | 1569 | CCGCGCCCGGGCUUCCCGG | 4467 | CCGGGAAGCCCGGGCGCGG |
| siRNA 1570 | 1570 | CGCGCCCGGGCUUCCCGGC | 4468 | GCCGGGAAGCCCGGGCGCG |
| siRNA 1571 | 1571 | GCGCCCGGGCUUCCCGGCC | 4469 | GGCCGGGAAGCCCGGGCGC |
| siRNA 1572 | 1572 | CGCCCGGGCUUCCCGGCCG | 4470 | CGGCCGGGAAGCCCGGGCG |
| siRNA 1573 | 1573 | GCCCGGGCUUCCCGGCCGU | 4471 | ACGGCCGGGAAGCCCGGGC |
| SIRNA 1574 | 1574 | CCCGGGCUUCCCGGCCGUG | 4472 | CACGGCCGGGAAGCCCGGG |
| siRNA 1575 | 1575 | CCGGGCUUCCCGGCCGUGC | 4473 | GCACGGCCGGGAAGCCCGG |
| siRNA 1576 | 1576 | CGGGCUUCCCGGCCGUGCC | 4474 | GGCACGGCCGGGAAGCCCG |
| siRNA 1577 | 1577 | GGGCUUCCCGGCCGUGCCC | 4475 | GGGCACGGCCGGGAAGCCC |
| siRNA 1578 | 1578 | GGCUUCCCGGCCGUGCCCC | 4476 | GGGGCACGGCCGGGAAGCC |
| siRNA 1579 | 1579 | GCUUCCCGGCCGUGCCCCG | 4477 | CGGGGCACGGCCGGGAAGC |
| siRNA 1580 | 1580 | CUUCCCGGCCGUGCCCCGC | 4478 | GCGGGGCACGGCCGGGAAG |
| siRNA 1581 | 1581 | UUCCCGGCCGUGCCCCGCG | 4479 | CGCGGGGCACGGCCGGGAA |
| siRNA 1582 | 1582 | UCCCGGCCGUGCCCCGCGA | 4480 | UCGCGGGGCACGGCCGGGA |
| siRNA 1583 | 1583 | CCCGGCCGUGCCCCGCGAG | 4481 | CUCGCGGGGCACGGCCGGG |
| siRNA 1584 | 1584 | CCGGCCGUGCCCCGCGAGA | 4482 | UCUCGCGGGGCACGGCCGG |
| siRNA 1585 | 1585 | CGGCCGUGCCCCGCGAGAA | 4483 | UUCUCGCGGGGCACGGCCG |
| siRNA 1586 | 1586 | GGCCGUGCCCCGCGAGAAG | 4484 | CUUCUCGCGGGGCACGGCC |
| siRNA 1587 | 1587 | GCCGUGCCCCGCGAGAAGC | 4485 | GCUUCUCGCGGGGCACGGC |
| siRNA 1588 | 1588 | CCGUGCCCCGCGAGAAGCC | 4486 | GGCUUCUCGCGGGGCACGG |
| siRNA 1589 | 1589 | CGUGCCCCGCGAGAAGCCA | 4487 | UGGCUUCUCGCGGGGCACG |
| siRNA 1590 | 1590 | GUGCCCCGCGAGAAGCCAA | 4488 | UUGGCUUCUCGCGGGGCAC |
| siRNA 1591 | 1591 | UGCCCCGCGAGAAGCCAAA | 4489 | UUUGGCUUCUCGCGGGGCA |
| siRNA 1592 | 1592 | GCCCCGCGAGAAGCCAAAG | 4490 | CUUUGGCUUCUCGCGGGGC |
| siRNA 1593 | 1593 | CCCCGCGAGAAGCCAAAGC | 4491 | GCUUUGGCUUCUCGCGGGG |
| siRNA 1594 | 1594 | CCCGCGAGAAGCCAAAGCG | 4492 | CGCUUUGGCUUCUCGCGGG |
| siRNA 1595 | 1595 | CCGCGAGAAGCCAAAGCGC | 4493 | GCGCUUUGGCUUCUCGCGG |
| siRNA 1596 | 1596 | CGCGAGAAGCCAAAGCGCA | 4494 | UGCGCUUUGGCUUCUCGCG |
| siRNA 1597 | 1597 | GCGAGAAGCCAAAGCGCAG | 4495 | CUGCGCUUUGGCUUCUCGC |
| siRNA 1598 | 1598 | CGAGAAGCCAAAGCGCAGG | 4496 | CCUGCGCUUUGGCUUCUCG |
| siRNA 1599 | 1599 | GAGAAGCCAAAGCGCAGGG | 4497 | CCCUGCGCUUUGGCUUCUC |
| siRNA 1600 | 1600 | AGAAGCCAAAGCGCAGGGU | 4498 | ACCCUGCGCUUUGGCUUCU |
| siRNA 1601 | 1601 | GAAGCCAAAGCGCAGGGUC | 4499 | GACCCUGCGCUUUGGCUUC |
| siRNA 1602 | 1602 | AAGCCAAAGCGCAGGGUCA | 4500 | UGACCCUGCGCUUUGGCUU |
| siRNA 1603 | 1603 | AGCCAAAGCGCAGGGUCAG | 4501 | CUGACCCUGCGCUUUGGCU |
| siRNA 1604 | 1604 | GCCAAAGCGCAGGGUCAGC | 4502 | GCUGACCCUGCGCUUUGGC |
| siRNA 1605 | 1605 | CCAAAGCGCAGGGUCAGCG | 4503 | CGCUGACCCUGCGCUUUGG |
| siRNA 1606 | 1606 | CAAAGCGCAGGGUCAGCGA | 4504 | UCGCUGACCCUGCGCUUUG |
| siRNA 1607 | 1607 | AAAGCGCAGGGUCAGCGAC | 4505 | GUCGCUGACCCUGCGCUUU |
| siRNA 1608 | 1608 | AAGCGCAGGGUCAGCGACA | 4506 | UGUCGCUGACCCUGCGCUU |
| siRNA 1609 | 1609 | AGCGCAGGGUCAGCGACAG | 4507 | CUGUCGCUGACCCUGCGCU |
| siRNA 1610 | 1610 | GCGCAGGGUCAGCGACAGC | 4508 | GCUGUCGCUGACCCUGCGC |
| siRNA 1611 | 1611 | CGCAGGGUCAGCGACAGCU | 4509 | AGCUGUCGCUGACCCUGCG |
| siRNA 1612 | 1612 | GCAGGGUCAGCGACAGCUU | 4510 | AAGCUGUCGCUGACCCUGC |
| siRNA 1613 | 1613 | CAGGGUCAGCGACAGCUUC | 4511 | GAAGCUGUCGCUGACCCUG |
| siRNA 1614 | 1614 | AGGGUCAGCGACAGCUUCU | 4512 | AGAAGCUGUCGCUGACCCU |
| siRNA 1615 | 1615 | GGGUCAGCGACAGCUUCUU | 4513 | AAGAAGCUGUCGCUGACCC |
| siRNA 1616 | 1616 | GGUCAGCGACAGCUUCUUC | 4514 | GAAGAAGCUGUCGCUGACC |
| SIRNA 1617 | 1617 | GUCAGCGACAGCUUCUUCC | 4515 | GGAAGAAGCUGUCGCUGAC |
| siRNA 1618 | 1618 | UCAGCGACAGCUUCUUCCG | 4516 | CGGAAGAAGCUGUCGCUGA |
| siRNA 1619 | 1619 | CAGCGACAGCUUCUUCCGG | 4517 | CCGGAAGAAGCUGUCGCUG |
| siRNA 1620 | 1620 | AGCGACAGCUUCUUCCGGC | 4518 | GCCGGAAGAAGCUGUCGCU |
| siRNA 1621 | 1621 | GCGACAGCUUCUUCCGGCC | 4519 | GGCCGGAAGAAGCUGUCGC |
| siRNA 1622 | 1622 | CGACAGCUUCUUCCGGCCC | 4520 | GGGCCGGAAGAAGCUGUCG |
| siRNA 1623 | 1623 | GACAGCUUCUUCCGGCCCA | 4521 | UGGGCCGGAAGAAGCUGUC |
| siRNA 1624 | 1624 | ACAGCUUCUUCCGGCCCAG | 4522 | CUGGGCCGGAAGAAGCUGU |
| siRNA 1625 | 1625 | CAGCUUCUUCCGGCCCAGC | 4523 | GCUGGGCCGGAAGAAGCUG |
| siRNA 1626 | 1626 | AGCUUCUUCCGGCCCAGCG | 4524 | CGCUGGGCCGGAAGAAGCU |
| siRNA 1627 | 1627 | GCUUCUUCCGGCCCAGCGU | 4525 | ACGCUGGGCCGGAAGAAGC |
| siRNA 1628 | 1628 | CUUCUUCCGGCCCAGCGUC | 4526 | GACGCUGGGCCGGAAGAAG |
| siRNA 1629 | 1629 | UUCUUCCGGCCCAGCGUCA | 4527 | UGACGCUGGGCCGGAAGAA |
| siRNA 1630 | 1630 | UCUUCCGGCCCAGCGUCAU | 4528 | AUGACGCUGGGCCGGAAGA |
| siRNA 1631 | 1631 | CUUCCGGCCCAGCGUCAUG | 4529 | CAUGACGCUGGGCCGGAAG |
| siRNA 1632 | 1632 | UUCCGGCCCAGCGUCAUGG | 4530 | CCAUGACGCUGGGCCGGAA |
| siRNA 1633 | 1633 | UCCGGCCCAGCGUCAUGGA | 4531 | UCCAUGACGCUGGGCCGGA |
| siRNA 1634 | 1634 | CCGGCCCAGCGUCAUGGAG | 4532 | CUCCAUGACGCUGGGCCGG |
| siRNA 1635 | 1635 | CGGCCCAGCGUCAUGGAGC | 4533 | GCUCCAUGACGCUGGGCCG |
| siRNA 1636 | 1636 | GGCCCAGCGUCAUGGAGCC | 4534 | GGCUCCAUGACGCUGGGCC |
| siRNA 1637 | 1637 | GCCCAGCGUCAUGGAGCCC | 4535 | GGGCUCCAUGACGCUGGGC |
| siRNA 1638 | 1638 | CCCAGCGUCAUGGAGCCCA | 4536 | UGGGCUCCAUGACGCUGGG |
| siRNA 1639 | 1639 | CCAGCGUCAUGGAGCCCAU | 4537 | AUGGGCUCCAUGACGCUGG |
| siRNA 1640 | 1640 | CAGCGUCAUGGAGCCCAUC | 4538 | GAUGGGCUCCAUGACGCUG |
| siRNA 1641 | 1641 | AGCGUCAUGGAGCCCAUCC | 4539 | GGAUGGGCUCCAUGACGCU |
| siRNA 1642 | 1642 | GCGUCAUGGAGCCCAUCCU | 4540 | AGGAUGGGCUCCAUGACGC |
| siRNA 1643 | 1643 | CGUCAUGGAGCCCAUCCUG | 4541 | CAGGAUGGGCUCCAUGACG |
| siRNA 1644 | 1644 | GUCAUGGAGCCCAUCCUGG | 4542 | CCAGGAUGGGCUCCAUGAC |
| siRNA 1645 | 1645 | UCAUGGAGCCCAUCCUGGG | 4543 | CCCAGGAUGGGCUCCAUGA |
| siRNA 1646 | 1646 | CAUGGAGCCCAUCCUGGGC | 4544 | GCCCAGGAUGGGCUCCAUG |
| siRNA 1647 | 1647 | AUGGAGCCCAUCCUGGGCC | 4545 | GGCCCAGGAUGGGCUCCAU |
| siRNA 1648 | 1648 | UGGAGCCCAUCCUGGGCCG | 4546 | CGGCCCAGGAUGGGCUCCA |
| siRNA 1649 | 1649 | GGAGCCCAUCCUGGGCCGC | 4547 | GCGGCCCAGGAUGGGCUCC |
| siRNA 1650 | 1650 | GAGCCCAUCCUGGGCCGCA | 4548 | UGCGGCCCAGGAUGGGCUC |
| siRNA 1651 | 1651 | AGCCCAUCCUGGGCCGCAC | 4549 | GUGCGGCCCAGGAUGGGCU |
| siRNA 1652 | 1652 | GCCCAUCCUGGGCCGCACG | 4550 | CGUGCGGCCCAGGAUGGGC |
| siRNA 1653 | 1653 | CCCAUCCUGGGCCGCACGC | 4551 | GCGUGCGGCCCAGGAUGGG |
| siRNA 1654 | 1654 | CCAUCCUGGGCCGCACGCA | 4552 | UGCGUGCGGCCCAGGAUGG |
| siRNA 1655 | 1655 | CAUCCUGGGCCGCACGCAU | 4553 | AUGCGUGCGGCCCAGGAUG |
| siRNA 1656 | 1656 | AUCCUGGGCCGCACGCAUU | 4554 | AAUGCGUGCGGCCCAGGAU |
| siRNA 1657 | 1657 | UCCUGGGCCGCACGCAUUA | 4555 | UAAUGCGUGCGGCCCAGGA |
| siRNA 1658 | 1658 | CCUGGGCCGCACGCAUUAC | 4556 | GUAAUGCGUGCGGCCCAGG |
| siRNA 1659 | 1659 | CUGGGCCGCACGCAUUACA | 4557 | UGUAAUGCGUGCGGCCCAG |
| siRNA 1660 | 1660 | UGGGCCGCACGCAUUACAG | 4558 | CUGUAAUGCGUGCGGCCCA |
| siRNA 1661 | 1661 | GGGCCGCACGCAUUACAGC | 4559 | GCUGUAAUGCGUGCGGCCC |
| siRNA 1662 | 1662 | GGCCGCACGCAUUACAGCC | 4560 | GGCUGUAAUGCGUGCGGCC |
| siRNA 1663 | 1663 | GCCGCACGCAUUACAGCCA | 4561 | UGGCUGUAAUGCGUGCGGC |
| siRNA 1664 | 1664 | CCGCACGCAUUACAGCCAG | 4562 | CUGGCUGUAAUGCGUGCGG |
| siRNA 1665 | 1665 | CGCACGCAUUACAGCCAGC | 4563 | GCUGGCUGUAAUGCGUGCG |
| siRNA 1666 | 1666 | GCACGCAUUACAGCCAGCU | 4564 | AGCUGGCUGUAAUGCGUGC |
| siRNA 1667 | 1667 | CACGCAUUACAGCCAGCUG | 4565 | CAGCUGGCUGUAAUGCGUG |
| siRNA 1668 | 1668 | ACGCAUUACAGCCAGCUGC | 4566 | GCAGCUGGCUGUAAUGCGU |
| siRNA 1669 | 1669 | CGCAUUACAGCCAGCUGCG | 4567 | CGCAGCUGGCUGUAAUGCG |
| siRNA 1670 | 1670 | GCAUUACAGCCAGCUGCGC | 4568 | GCGCAGCUGGCUGUAAUGC |
| siRNA 1671 | 1671 | CAUUACAGCCAGCUGCGCA | 4569 | UGCGCAGCUGGCUGUAAUG |
| siRNA 1672 | 1672 | AUUACAGCCAGCUGCGCAA | 4570 | UUGCGCAGCUGGCUGUAAU |
| siRNA 1673 | 1673 | UUACAGCCAGCUGCGCAAG | 4571 | CUUGCGCAGCUGGCUGUAA |
| siRNA 1674 | 1674 | UACAGCCAGCUGCGCAAGA | 4572 | UCUUGCGCAGCUGGCUGUA |
| siRNA 1675 | 1675 | ACAGCCAGCUGCGCAAGAA | 4573 | UUCUUGCGCAGCUGGCUGU |
| siRNA 1676 | 1676 | CAGCCAGCUGCGCAAGAAG | 4574 | CUUCUUGCGCAGCUGGCUG |
| siRNA 1677 | 1677 | AGCCAGCUGCGCAAGAAGA | 4575 | UCUUCUUGCGCAGCUGGCU |
| siRNA 1678 | 1678 | GCCAGCUGCGCAAGAAGAG | 4576 | CUCUUCUUGCGCAGCUGGC |
| siRNA 1679 | 1679 | CCAGCUGCGCAAGAAGAGC | 4577 | GCUCUUCUUGCGCAGCUGG |
| siRNA 1680 | 1680 | CAGCUGCGCAAGAAGAGCU | 4578 | AGCUCUUCUUGCGCAGCUG |
| siRNA 1681 | 1681 | AGCUGCGCAAGAAGAGCUG | 4579 | CAGCUCUUCUUGCGCAGCU |
| siRNA 1682 | 1682 | GCUGCGCAAGAAGAGCUGA | 4580 | UCAGCUCUUCUUGCGCAGC |
| siRNA 1683 | 1683 | CUGCGCAAGAAGAGCUGAG | 4581 | CUCAGCUCUUCUUGCGCAG |
| siRNA 1684 | 1684 | UGCGCAAGAAGAGCUGAGU | 4582 | ACUCAGCUCUUCUUGCGCA |
| siRNA 1685 | 1685 | GCGCAAGAAGAGCUGAGUC | 4583 | GACUCAGCUCUUCUUGCGC |
| siRNA 1686 | 1686 | CGCAAGAAGAGCUGAGUCG | 4584 | CGACUCAGCUCUUCUUGCG |
| siRNA 1687 | 1687 | GCAAGAAGAGCUGAGUCGC | 4585 | GCGACUCAGCUCUUCUUGC |
| siRNA 1688 | 1688 | CAAGAAGAGCUGAGUCGCC | 4586 | GGCGACUCAGCUCUUCUUG |
| siRNA 1689 | 1689 | AAGAAGAGCUGAGUCGCCG | 4587 | CGGCGACUCAGCUCUUCUU |
| siRNA 1690 | 1690 | AGAAGAGCUGAGUCGCCGC | 4588 | GCGGCGACUCAGCUCUUCU |
| siRNA 1691 | 1691 | GAAGAGCUGAGUCGCCGCA | 4589 | UGCGGCGACUCAGCUCUUC |
| siRNA 1692 | 1692 | AAGAGCUGAGUCGCCGCAC | 4590 | GUGCGGCGACUCAGCUCUU |
| siRNA 1693 | 1693 | AGAGCUGAGUCGCCGCACC | 4591 | GGUGCGGCGACUCAGCUCU |
| siRNA 1694 | 1694 | GAGCUGAGUCGCCGCACCA | 4592 | UGGUGCGGCGACUCAGCUC |
| siRNA 1695 | 1695 | AGCUGAGUCGCCGCACCAG | 4593 | CUGGUGCGGCGACUCAGCU |
| siRNA 1696 | 1696 | GCUGAGUCGCCGCACCAGC | 4594 | GCUGGUGCGGCGACUCAGC |
| siRNA 1697 | 1697 | CUGAGUCGCCGCACCAGCC | 4595 | GGCUGGUGCGGCGACUCAG |
| siRNA 1698 | 1698 | UGAGUCGCCGCACCAGCCG | 4596 | CGGCUGGUGCGGCGACUCA |
| siRNA 1699 | 1699 | GAGUCGCCGCACCAGCCGC | 4597 | GCGGCUGGUGCGGCGACUC |
| siRNA 1700 | 1700 | AGUCGCCGCACCAGCCGCC | 4598 | GGCGGCUGGUGCGGCGACU |
| siRNA 1701 | 1701 | GUCGCCGCACCAGCCGCCG | 4599 | CGGCGGCUGGUGCGGCGAC |
| siRNA 1702 | 1702 | UCGCCGCACCAGCCGCCGC | 4600 | GCGGCGGCUGGUGCGGCGA |
| siRNA 1703 | 1703 | CGCCGCACCAGCCGCCGCG | 4601 | CGCGGCGGCUGGUGCGGCG |
| siRNA 1704 | 1704 | GCCGCACCAGCCGCCGCGC | 4602 | GCGCGGCGGCUGGUGCGGC |
| siRNA 1705 | 1705 | CCGCACCAGCCGCCGCGCC | 4603 | GGCGCGGCGGCUGGUGCGG |
| siRNA 1706 | 1706 | CGCACCAGCCGCCGCGCCC | 4604 | GGGCGCGGCGGCUGGUGCG |
| siRNA 1707 | 1707 | GCACCAGCCGCCGCGCCCC | 4605 | GGGGCGCGGCGGCUGGUGC |
| siRNA 1708 | 1708 | CACCAGCCGCCGCGCCCCG | 4606 | CGGGGCGCGGCGGCUGGUG |
| SIRNA 1709 | 1709 | ACCAGCCGCCGCGCCCCGG | 4607 | CCGGGGCGCGGCGGCUGGU |
| siRNA 1710 | 1710 | CCAGCCGCCGCGCCCCGGG | 4608 | CCCGGGGCGCGGCGGCUGG |
| siRNA 1711 | 1711 | CAGCCGCCGCGCCCCGGGC | 4609 | GCCCGGGGCGCGGCGGCUG |
| siRNA 1712 | 1712 | AGCCGCCGCGCCCCGGGCC | 4610 | GGCCCGGGGCGCGGCGGCU |
| siRNA 1713 | 1713 | GCCGCCGCGCCCCGGGCCG | 4611 | CGGCCCGGGGCGCGGCGGC |
| siRNA 1714 | 1714 | CCGCCGCGCCCCGGGCCGG | 4612 | CCGGCCCGGGGCGCGGCGG |
| siRNA 1715 | 1715 | CGCCGCGCCCCGGGCCGGC | 4613 | GCCGGCCCGGGGCGCGGCG |
| siRNA 1716 | 1716 | GCCGCGCCCCGGGCCGGCG | 4614 | CGCCGGCCCGGGGCGCGGC |
| siRNA 1717 | 1717 | CCGCGCCCCGGGCCGGCGG | 4615 | CCGCCGGCCCGGGGCGCGG |
| siRNA 1718 | 1718 | CGCGCCCCGGGCCGGCGGG | 4616 | CCCGCCGGCCCGGGGCGCG |
| siRNA 1719 | 1719 | GCGCCCCGGGCCGGCGGGU | 4617 | ACCCGCCGGCCCGGGGCGC |
| siRNA 1720 | 1720 | CGCCCCGGGCCGGCGGGUU | 4618 | AACCCGCCGGCCCGGGGCG |
| siRNA 1721 | 1721 | GCCCCGGGCCGGCGGGUUU | 4619 | AAACCCGCCGGCCCGGGGC |
| siRNA 1722 | 1722 | CCCCGGGCCGGCGGGUUUC | 4620 | GAAACCCGCCGGCCCGGGG |
| siRNA 1723 | 1723 | CCCGGGCCGGCGGGUUUCU | 4621 | AGAAACCCGCCGGCCCGGG |
| siRNA 1724 | 1724 | CCGGGCCGGCGGGUUUCUC | 4622 | GAGAAACCCGCCGGCCCGG |
| SIRNA 1725 | 1725 | CGGGCCGGCGGGUUUCUCU | 4623 | AGAGAAACCCGCCGGCCCG |
| siRNA 1726 | 1726 | GGGCCGGCGGGUUUCUCUA | 4624 | UAGAGAAACCCGCCGGCCC |
| siRNA 1727 | 1727 | GGCCGGCGGGUUUCUCUAA | 4625 | UUAGAGAAACCCGCCGGCC |
| siRNA 1728 | 1728 | GCCGGCGGGUUUCUCUAAC | 4626 | GUUAGAGAAACCCGCCGGC |
| siRNA 1729 | 1729 | CCGGCGGGUUUCUCUAACA | 4627 | UGUUAGAGAAACCCGCCGG |
| siRNA 1730 | 1730 | CGGCGGGUUUCUCUAACAA | 4628 | UUGUUAGAGAAACCCGCCG |
| siRNA 1731 | 1731 | GGCGGGUUUCUCUAACAAA | 4629 | UUUGUUAGAGAAACCCGCC |
| siRNA 1732 | 1732 | GCGGGUUUCUCUAACAAAU | 4630 | AUUUGUUAGAGAAACCCGC |
| siRNA 1733 | 1733 | CGGGUUUCUCUAACAAAUA | 4631 | UAUUUGUUAGAGAAACCCG |
| siRNA 1734 | 1734 | GGGUUUCUCUAACAAAUAA | 4632 | UUAUUUGUUAGAGAAACCC |
| siRNA 1735 | 1735 | GGUUUCUCUAACAAAUAAA | 4633 | UUUAUUUGUUAGAGAAACC |
| siRNA 1736 | 1736 | GUUUCUCUAACAAAUAAAC | 4634 | GUUUAUUUGUUAGAGAAAC |
| siRNA 1737 | 1737 | UUUCUCUAACAAAUAAACA | 4635 | UGUUUAUUUGUUAGAGAAA |
| siRNA 1738 | 1738 | UUCUCUAACAAAUAAACAG | 4636 | CUGUUUAUUUGUUAGAGAA |
| siRNA 1739 | 1739 | UCUCUAACAAAUAAACAGA | 4637 | UCUGUUUAUUUGUUAGAGA |
| siRNA 1740 | 1740 | CUCUAACAAAUAAACAGAA | 4638 | UUCUGUUUAUUUGUUAGAG |
| siRNA 1741 | 1741 | UCUAACAAAUAAACAGAAC | 4639 | GUUCUGUUUAUUUGUUAGA |
| siRNA 1742 | 1742 | CUAACAAAUAAACAGAACC | 4640 | GGUUCUGUUUAUUUGUUAG |
| siRNA 1743 | 1743 | UAACAAAUAAACAGAACCC | 4641 | GGGUUCUGUUUAUUUGUUA |
| siRNA 1744 | 1744 | AACAAAUAAACAGAACCCG | 4642 | CGGGUUCUGUUUAUUUGUU |
| siRNA 1745 | 1745 | ACAAAUAAACAGAACCCGC | 4643 | GCGGGUUCUGUUUAUUUGU |
| siRNA 1746 | 1746 | CAAAUAAACAGAACCCGCA | 4644 | UGCGGGUUCUGUUUAUUUG |
| siRNA 1747 | 1747 | AAAUAAACAGAACCCGCAC | 4645 | GUGCGGGUUCUGUUUAUUU |
| siRNA 1748 | 1748 | AAUAAACAGAACCCGCACU | 4646 | AGUGCGGGUUCUGUUUAUU |
| siRNA 1749 | 1749 | AUAAACAGAACCCGCACUG | 4647 | CAGUGCGGGUUCUGUUUAU |
| siRNA 1750 | 1750 | UAAACAGAACCCGCACUGC | 4648 | GCAGUGCGGGUUCUGUUUA |
| siRNA 1751 | 1751 | AAACAGAACCCGCACUGCC | 4649 | GGCAGUGCGGGUUCUGUUU |
| siRNA 1752 | 1752 | AACAGAACCCGCACUGCCC | 4650 | GGGCAGUGCGGGUUCUGUU |
| siRNA 1753 | 1753 | ACAGAACCCGCACUGCCCA | 4651 | UGGGCAGUGCGGGUUCUGU |
| siRNA 1754 | 1754 | CAGAACCCGCACUGCCCAG | 4652 | CUGGGCAGUGCGGGUUCUG |
| siRNA 1755 | 1755 | AGAACCCGCACUGCCCAGG | 4653 | CCUGGGCAGUGCGGGUUCU |
| siRNA 1756 | 1756 | GAACCCGCACUGCCCAGGC | 4654 | GCCUGGGCAGUGCGGGUUC |
| SIRNA 1757 | 1757 | AACCCGCACUGCCCAGGCG | 4655 | CGCCUGGGCAGUGCGGGUU |
| siRNA 1758 | 1758 | ACCCGCACUGCCCAGGCGA | 4656 | UCGCCUGGGCAGUGCGGGU |
| siRNA 1759 | 1759 | CCCGCACUGCCCAGGCGAG | 4657 | CUCGCCUGGGCAGUGCGGG |
| siRNA 1760 | 1760 | CCGCACUGCCCAGGCGAGC | 4658 | GCUCGCCUGGGCAGUGCGG |
| siRNA 1761 | 1761 | CGCACUGCCCAGGCGAGCG | 4659 | CGCUCGCCUGGGCAGUGCG |
| siRNA 1762 | 1762 | GCACUGCCCAGGCGAGCGU | 4660 | ACGCUCGCCUGGGCAGUGC |
| siRNA 1763 | 1763 | CACUGCCCAGGCGAGCGUU | 4661 | AACGCUCGCCUGGGCAGUG |
| siRNA 1764 | 1764 | ACUGCCCAGGCGAGCGUUG | 4662 | CAACGCUCGCCUGGGCAGU |
| siRNA 1765 | 1765 | CUGCCCAGGCGAGCGUUGC | 4663 | GCAACGCUCGCCUGGGCAG |
| siRNA 1766 | 1766 | UGCCCAGGCGAGCGUUGCC | 4664 | GGCAACGCUCGCCUGGGCA |
| siRNA 1767 | 1767 | GCCCAGGCGAGCGUUGCCA | 4665 | UGGCAACGCUCGCCUGGGC |
| siRNA 1768 | 1768 | CCCAGGCGAGCGUUGCCAC | 4666 | GUGGCAACGCUCGCCUGGG |
| siRNA 1769 | 1769 | CCAGGCGAGCGUUGCCACU | 4667 | AGUGGCAACGCUCGCCUGG |
| siRNA 1770 | 1770 | CAGGCGAGCGUUGCCACUU | 4668 | AAGUGGCAACGCUCGCCUG |
| siRNA 1771 | 1771 | AGGCGAGCGUUGCCACUUU | 4669 | AAAGUGGCAACGCUCGCCU |
| siRNA 1772 | 1772 | GGCGAGCGUUGCCACUUUC | 4670 | GAAAGUGGCAACGCUCGCC |
| siRNA 1773 | 1773 | GCGAGCGUUGCCACUUUCA | 4671 | UGAAAGUGGCAACGCUCGC |
| siRNA 1774 | 1774 | CGAGCGUUGCCACUUUCAA | 4672 | UUGAAAGUGGCAACGCUCG |
| siRNA 1775 | 1775 | GAGCGUUGCCACUUUCAAA | 4673 | UUUGAAAGUGGCAACGCUC |
| siRNA 1776 | 1776 | AGCGUUGCCACUUUCAAAG | 4674 | CUUUGAAAGUGGCAACGCU |
| siRNA 1777 | 1777 | GCGUUGCCACUUUCAAAGU | 4675 | ACUUUGAAAGUGGCAACGC |
| siRNA 1778 | 1778 | CGUUGCCACUUUCAAAGUG | 4676 | CACUUUGAAAGUGGCAACG |
| siRNA 1779 | 1779 | GUUGCCACUUUCAAAGUGG | 4677 | CCACUUUGAAAGUGGCAAC |
| siRNA 1780 | 1780 | UUGCCACUUUCAAAGUGGU | 4678 | ACCACUUUGAAAGUGGCAA |
| siRNA 1781 | 1781 | UGCCACUUUCAAAGUGGUC | 4679 | GACCACUUUGAAAGUGGCA |
| siRNA 1782 | 1782 | GCCACUUUCAAAGUGGUCC | 4680 | GGACCACUUUGAAAGUGGC |
| siRNA 1783 | 1783 | CCACUUUCAAAGUGGUCCC | 4681 | GGGACCACUUUGAAAGUGG |
| siRNA 1784 | 1784 | CACUUUCAAAGUGGUCCCC | 4682 | GGGGACCACUUUGAAAGUG |
| siRNA 1785 | 1785 | ACUUUCAAAGUGGUCCCCU | 4683 | AGGGGACCACUUUGAAAGU |
| siRNA 1786 | 1786 | CUUUCAAAGUGGUCCCCUG | 4684 | CAGGGGACCACUUUGAAAG |
| siRNA 1787 | 1787 | UUUCAAAGUGGUCCCCUGG | 4685 | CCAGGGGACCACUUUGAAA |
| siRNA 1788 | 1788 | UUCAAAGUGGUCCCCUGGG | 4686 | CCCAGGGGACCACUUUGAA |
| siRNA 1789 | 1789 | UCAAAGUGGUCCCCUGGGG | 4687 | CCCCAGGGGACCACUUUGA |
| siRNA 1790 | 1790 | CAAAGUGGUCCCCUGGGGA | 4688 | UCCCCAGGGGACCACUUUG |
| siRNA 1791 | 1791 | AAAGUGGUCCCCUGGGGAG | 4689 | CUCCCCAGGGGACCACUUU |
| siRNA 1792 | 1792 | AAGUGGUCCCCUGGGGAGC | 4690 | GCUCCCCAGGGGACCACUU |
| siRNA 1793 | 1793 | AGUGGUCCCCUGGGGAGCU | 4691 | AGCUCCCCAGGGGACCACU |
| siRNA 1794 | 1794 | GUGGUCCCCUGGGGAGCUC | 4692 | GAGCUCCCCAGGGGACCAC |
| siRNA 1795 | 1795 | UGGUCCCCUGGGGAGCUCA | 4693 | UGAGCUCCCCAGGGGACCA |
| siRNA 1796 | 1796 | GGUCCCCUGGGGAGCUCAG | 4694 | CUGAGCUCCCCAGGGGACC |
| siRNA 1797 | 1797 | GUCCCCUGGGGAGCUCAGC | 4695 | GCUGAGCUCCCCAGGGGAC |
| siRNA 1798 | 1798 | UCCCCUGGGGAGCUCAGCC | 4696 | GGCUGAGCUCCCCAGGGGA |
| siRNA 1799 | 1799 | CCCCUGGGGAGCUCAGCCU | 4697 | AGGCUGAGCUCCCCAGGGG |
| siRNA 1800 | 1800 | CCCUGGGGAGCUCAGCCUC | 4698 | GAGGCUGAGCUCCCCAGGG |
| siRNA 1801 | 1801 | CCUGGGGAGCUCAGCCUCA | 4699 | UGAGGCUGAGCUCCCCAGG |
| siRNA 1802 | 1802 | CUGGGGAGCUCAGCCUCAU | 4700 | AUGAGGCUGAGCUCCCCAG |
| siRNA 1803 | 1803 | UGGGGAGCUCAGCCUCAUC | 4701 | GAUGAGGCUGAGCUCCCCA |
| siRNA 1804 | 1804 | GGGGAGCUCAGCCUCAUCC | 4702 | GGAUGAGGCUGAGCUCCCC |
| siRNA 1805 | 1805 | GGGAGCUCAGCCUCAUCCU | 4703 | AGGAUGAGGCUGAGCUCCC |
| siRNA 1806 | 1806 | GGAGCUCAGCCUCAUCCUG | 4704 | CAGGAUGAGGCUGAGCUCC |
| siRNA 1807 | 1807 | GAGCUCAGCCUCAUCCUGA | 4705 | UCAGGAUGAGGCUGAGCUC |
| siRNA 1808 | 1808 | AGCUCAGCCUCAUCCUGAU | 4706 | AUCAGGAUGAGGCUGAGCU |
| siRNA 1809 | 1809 | GCUCAGCCUCAUCCUGAUG | 4707 | CAUCAGGAUGAGGCUGAGC |
| SIRNA 1810 | 1810 | CUCAGCCUCAUCCUGAUGA | 4708 | UCAUCAGGAUGAGGCUGAG |
| siRNA 1811 | 1811 | UCAGCCUCAUCCUGAUGAU | 4709 | AUCAUCAGGAUGAGGCUGA |
| siRNA 1812 | 1812 | CAGCCUCAUCCUGAUGAUG | 4710 | CAUCAUCAGGAUGAGGCUG |
| siRNA 1813 | 1813 | AGCCUCAUCCUGAUGAUGC | 4711 | GCAUCAUCAGGAUGAGGCU |
| siRNA 1814 | 1814 | GCCUCAUCCUGAUGAUGCU | 4712 | AGCAUCAUCAGGAUGAGGC |
| siRNA 1815 | 1815 | CCUCAUCCUGAUGAUGCUG | 4713 | CAGCAUCAUCAGGAUGAGG |
| siRNA 1816 | 1816 | CUCAUCCUGAUGAUGCUGC | 4714 | GCAGCAUCAUCAGGAUGAG |
| siRNA 1817 | 1817 | UCAUCCUGAUGAUGCUGCC | 4715 | GGCAGCAUCAUCAGGAUGA |
| siRNA 1818 | 1818 | CAUCCUGAUGAUGCUGCCA | 4716 | UGGCAGCAUCAUCAGGAUG |
| siRNA 1819 | 1819 | AUCCUGAUGAUGCUGCCAA | 4717 | UUGGCAGCAUCAUCAGGAU |
| siRNA 1820 | 1820 | UCCUGAUGAUGCUGCCAAG | 4718 | CUUGGCAGCAUCAUCAGGA |
| siRNA 1821 | 1821 | CCUGAUGAUGCUGCCAAGG | 4719 | CCUUGGCAGCAUCAUCAGG |
| siRNA 1822 | 1822 | CUGAUGAUGCUGCCAAGGC | 4720 | GCCUUGGCAGCAUCAUCAG |
| siRNA 1823 | 1823 | UGAUGAUGCUGCCAAGGCG | 4721 | CGCCUUGGCAGCAUCAUCA |
| siRNA 1824 | 1824 | GAUGAUGCUGCCAAGGCGC | 4722 | GCGCCUUGGCAGCAUCAUC |
| siRNA 1825 | 1825 | AUGAUGCUGCCAAGGCGCA | 4723 | UGCGCCUUGGCAGCAUCAU |
| siRNA 1826 | 1826 | UGAUGCUGCCAAGGCGCAC | 4724 | GUGCGCCUUGGCAGCAUCA |
| siRNA 1827 | 1827 | GAUGCUGCCAAGGCGCACU | 4725 | AGUGCGCCUUGGCAGCAUC |
| siRNA 1828 | 1828 | AUGCUGCCAAGGCGCACUU | 4726 | AAGUGCGCCUUGGCAGCAU |
| siRNA 1829 | 1829 | UGCUGCCAAGGCGCACUUU | 4727 | AAAGUGCGCCUUGGCAGCA |
| siRNA 1830 | 1830 | GCUGCCAAGGCGCACUUUU | 4728 | AAAAGUGCGCCUUGGCAGC |
| siRNA 1831 | 1831 | CUGCCAAGGCGCACUUUUU | 4729 | AAAAAGUGCGCCUUGGCAG |
| siRNA 1832 | 1832 | UGCCAAGGCGCACUUUUUA | 4730 | UAAAAAGUGCGCCUUGGCA |
| siRNA 1833 | 1833 | GCCAAGGCGCACUUUUUAU | 4731 | AUAAAAAGUGCGCCUUGGC |
| siRNA 1834 | 1834 | CCAAGGCGCACUUUUUAUU | 4732 | AAUAAAAAGUGCGCCUUGG |
| siRNA 1835 | 1835 | CAAGGCGCACUUUUUAUUU | 4733 | AAAUAAAAAGUGCGCCUUG |
| siRNA 1836 | 1836 | AAGGCGCACUUUUUAUUUU | 4734 | AAAAUAAAAAGUGCGCCUU |
| siRNA 1837 | 1837 | AGGCGCACUUUUUUUUUU | 4735 | AAAAAUAAAAAGUGCGCCU |
| siRNA 1838 | 1838 | GGCGCACUUUUUAUUUUUA | 4736 | UAAAAAUAAAAAGUGCGCC |
| siRNA 1839 | 1839 | GCGCACUUUUUAUUUUUAU | 4737 | AUAAAAAUAAAAAGUGCGC |
| siRNA 1840 | 1840 | CGCACUUUUUAUUUUUAUU | 4738 | AAUAAAAAUAAAAAGUGCG |
| siRNA 1841 | 1841 | GCACUUUUUAUUUUUAUUU | 4739 | AAAUAAAAAUAAAAAGUGC |
| siRNA 1842 | 1842 | CACUUUUUAUUUUUAUUUU | 4740 | AAAAUAAAAAUAAAAAGUG |
| siRNA 1843 | 1843 | ACUUUUUAUUUUUAUUUUA | 4741 | UAAAAUAAAAAUAAAAAGU |
| siRNA 1844 | 1844 | CUUUUUAUUUUUAUUUUAU | 4742 | AUAAAAUAAAAAUAAAAAG |
| siRNA 1845 | 1845 | UUUUUAUUUUUAUUUUAUU | 4743 | AAUAAAAUAAAAAUAAAAA |
| SIRNA 1846 | 1846 | UUUUAUUUUUAUUUUAUUU | 4744 | AAAUAAAAUAAAAAUAAAA |
| siRNA 1847 | 1847 | UUUAUUUUUAUUUUAUUUU | 4745 | AAAAUAAAAAUAAAAUAAA |
| siRNA 1848 | 1848 | UUAUUUUUAUUUUAUUUUU | 4746 | AAAAAUAAAAUAAAAAUAA |
| siRNA 1849 | 1849 | UAUUUUUAUUUUAUUUUUA | 4747 | UAAAAAUAAAAUAAAAAUA |
| siRNA 1850 | 1850 | AUUUUUAUUUUAUUUUUAU | 4748 | AUAAAAAUAAAAUAAAAAU |
| siRNA 1851 | 1851 | UUUUUAUUUUAUUUUUAUU | 4749 | AAUAAAAAUAAAAUAAAAA |
| siRNA 1852 | 1852 | UUUUAUUUUAUUUUUAUUU | 4750 | AAAUAAAAAUAAAAUAAAA |
| siRNA 1853 | 1853 | UUUAUUUUAUUUUUAUUUU | 4751 | AAAAUAAAAAUAAAAUAAA |
| siRNA 1854 | 1854 | UUAUUUUAUUUUUAUUUUU | 4752 | AAAAAUAAAAAUAAAAUAA |
| siRNA 1855 | 1855 | UAUUUUAUUUUUAUUUUUU | 4753 | AAAAAAUAAAAAUAAAAUA |
| siRNA 1856 | 1856 | AUUUUAUUUUUAUUUUUUU | 4754 | AAAAAAAUAAAAAUAAAAU |
| siRNA 1857 | 1857 | UUUUAUUUUUAUUUUUUUU | 4755 | AAAAAAAAUAAAAAUAAAA |
| siRNA 1858 | 1858 | UUUAUUUUUAUUUUUUUUU | 4756 | AAAAAAAAAUAAAAAUAAA |
| siRNA 1859 | 1859 | UUAUUUUUAUUUUUUUUUU | 4757 | AAAAAAAAAAUAAAAAUAA |
| siRNA 1860 | 1860 | UAUUUUUAUUUUUUUUUUA | 4758 | UAAAAAAAAAAUAAAAAUA |
| siRNA 1861 | 1861 | AUUUUUAUUUUUUUUUUAG | 4759 | CUAAAAAAAAAAUAAAAAU |
| siRNA 1862 | 1862 | UUUUUAUUUUUUUUUUAGC | 4760 | GCUAAAAAAAAAAUAAAAA |
| siRNA 1863 | 1863 | UUUUAUUUUUUUUUUAGCA | 4761 | UGCUAAAAAAAAAAUAAAA |
| siRNA 1864 | 1864 | UUUAUUUUUUUUUUAGCAU | 4762 | AUGCUAAAAAAAAAAUAAA |
| siRNA 1865 | 1865 | UUAUUUUUUUUUUAGCAUC | 4763 | GAUGCUAAAAAAAAAAUAA |
| siRNA 1866 | 1866 | UAUUUUUUUUUUAGCAUCC | 4764 | GGAUGCUAAAAAAAAAAUA |
| siRNA 1867 | 1867 | AUUUUUUUUUUAGCAUCCU | 4765 | AGGAUGCUAAAAAAAAAAU |
| siRNA 1868 | 1868 | UUUUUUUUUUAGCAUCCUU | 4766 | AAGGAUGCUAAAAAAAAAA |
| siRNA 1869 | 1869 | UUUUUUUUUAGCAUCCUUU | 4767 | AAAGGAUGCUAAAAAAAAA |
| siRNA 1870 | 1870 | UUUUUUUUAGCAUCCUUUU | 4768 | AAAAGGAUGCUAAAAAAAA |
| siRNA 1871 | 1871 | UUUUUUUAGCAUCCUUUUG | 4769 | CAAAAGGAUGCUAAAAAAA |
| siRNA 1872 | 1872 | UUUUUUAGCAUCCUUUUGG | 4770 | CCAAAAGGAUGCUAAAAAA |
| siRNA 1873 | 1873 | UUUUUAGCAUCCUUUUGGG | 4771 | CCCAAAAGGAUGCUAAAAA |
| siRNA 1874 | 1874 | UUUUAGCAUCCUUUUGGGG | 4772 | CCCCAAAAGGAUGCUAAAA |
| siRNA 1875 | 1875 | UUUAGCAUCCUUUUGGGGC | 4773 | GCCCCAAAAGGAUGCUAAA |
| siRNA 1876 | 1876 | UUAGCAUCCUUUUGGGGCU | 4774 | AGCCCCAAAAGGAUGCUAA |
| siRNA 1877 | 1877 | UAGCAUCCUUUUGGGGCUU | 4775 | AAGCCCCAAAAGGAUGCUA |
| siRNA 1878 | 1878 | AGCAUCCUUUUGGGGCUUC | 4776 | GAAGCCCCAAAAGGAUGCU |
| siRNA 1879 | 1879 | GCAUCCUUUUGGGGCUUCA | 4777 | UGAAGCCCCAAAAGGAUGC |
| siRNA 1880 | 1880 | CAUCCUUUUGGGGCUUCAC | 4778 | GUGAAGCCCCAAAAGGAUG |
| siRNA 1881 | 1881 | AUCCUUUUGGGGCUUCACU | 4779 | AGUGAAGCCCCAAAAGGAU |
| siRNA 1882 | 1882 | UCCUUUUGGGGCUUCACUC | 4780 | GAGUGAAGCCCCAAAAGGA |
| siRNA 1883 | 1883 | CCUUUUGGGGCUUCACUCU | 4781 | AGAGUGAAGCCCCAAAAGG |
| siRNA 1884 | 1884 | CUUUUGGGGCUUCACUCUC | 4782 | GAGAGUGAAGCCCCAAAAG |
| siRNA 1885 | 1885 | UUUUGGGGCUUCACUCUCA | 4783 | UGAGAGUGAAGCCCCAAAA |
| siRNA 1886 | 1886 | UUUGGGGCUUCACUCUCAG | 4784 | CUGAGAGUGAAGCCCCAAA |
| siRNA 1887 | 1887 | UUGGGGCUUCACUCUCAGA | 4785 | UCUGAGAGUGAAGCCCCAA |
| siRNA 1888 | 1888 | UGGGGCUUCACUCUCAGAG | 4786 | CUCUGAGAGUGAAGCCCCA |
| siRNA 1889 | 1889 | GGGGCUUCACUCUCAGAGC | 4787 | GCUCUGAGAGUGAAGCCCC |
| siRNA 1890 | 1890 | GGGCUUCACUCUCAGAGCC | 4788 | GGCUCUGAGAGUGAAGCCC |
| siRNA 1891 | 1891 | GGCUUCACUCUCAGAGCCA | 4789 | UGGCUCUGAGAGUGAAGCC |
| siRNA 1892 | 1892 | GCUUCACUCUCAGAGCCAG | 4790 | CUGGCUCUGAGAGUGAAGC |
| siRNA 1893 | 1893 | CUUCACUCUCAGAGCCAGU | 4791 | ACUGGCUCUGAGAGUGAAG |
| siRNA 1894 | 1894 | UUCACUCUCAGAGCCAGUU | 4792 | AACUGGCUCUGAGAGUGAA |
| siRNA 1895 | 1895 | UCACUCUCAGAGCCAGUUU | 4793 | AAACUGGCUCUGAGAGUGA |
| siRNA 1896 | 1896 | CACUCUCAGAGCCAGUUUU | 4794 | AAAACUGGCUCUGAGAGUG |
| siRNA 1897 | 1897 | ACUCUCAGAGCCAGUUUUU | 4795 | AAAAACUGGCUCUGAGAGU |
| siRNA 1898 | 1898 | CUCUCAGAGCCAGUUUUUA | 4796 | UAAAAACUGGCUCUGAGAG |
| siRNA 1899 | 1899 | UCUCAGAGCCAGUUUUUAA | 4797 | UUAAAAACUGGCUCUGAGA |
| siRNA 1900 | 1900 | CUCAGAGCCAGUUUUUAAG | 4798 | CUUAAAAACUGGCUCUGAG |
| siRNA 1901 | 1901 | UCAGAGCCAGUUUUUAAGG | 4799 | CCUUAAAAACUGGCUCUGA |
| siRNA 1902 | 1902 | CAGAGCCAGUUUUUAAGGG | 4800 | CCCUUAAAAACUGGCUCUG |
| siRNA 1903 | 1903 | AGAGCCAGUUUUUAAGGGA | 4801 | UCCCUUAAAAACUGGCUCU |
| siRNA 1904 | 1904 | GAGCCAGUUUUUAAGGGAC | 4802 | GUCCCUUAAAAACUGGCUC |
| siRNA 1905 | 1905 | AGCCAGUUUUUAAGGGACA | 4803 | UGUCCCUUAAAAACUGGCU |
| siRNA 1906 | 1906 | GCCAGUUUUUAAGGGACAC | 4804 | GUGUCCCUUAAAAACUGGC |
| siRNA 1907 | 1907 | CCAGUUUUUAAGGGACACC | 4805 | GGUGUCCCUUAAAAACUGG |
| siRNA 1908 | 1908 | CAGUUUUUAAGGGACACCA | 4806 | UGGUGUCCCUUAAAAACUG |
| siRNA 1909 | 1909 | AGUUUUUAAGGGACACCAG | 4807 | CUGGUGUCCCUUAAAAACU |
| siRNA 1910 | 1910 | GUUUUUAAGGGACACCAGA | 4808 | UCUGGUGUCCCUUAAAAAC |
| siRNA 1911 | 1911 | UUUUUAAGGGACACCAGAG | 4809 | CUCUGGUGUCCCUUAAAAA |
| siRNA 1912 | 1912 | UUUUAAGGGACACCAGAGC | 4810 | GCUCUGGUGUCCCUUAAAA |
| siRNA 1913 | 1913 | UUUAAGGGACACCAGAGCC | 4811 | GGCUCUGGUGUCCCUUAAA |
| siRNA 1914 | 1914 | UUAAGGGACACCAGAGCCG | 4812 | CGGCUCUGGUGUCCCUUAA |
| siRNA 1915 | 1915 | UAAGGGACACCAGAGCCGC | 4813 | GCGGCUCUGGUGUCCCUUA |
| siRNA 1916 | 1916 | AAGGGACACCAGAGCCGCA | 4814 | UGCGGCUCUGGUGUCCCUU |
| siRNA 1917 | 1917 | AGGGACACCAGAGCCGCAG | 4815 | CUGCGGCUCUGGUGUCCCU |
| siRNA 1918 | 1918 | GGGACACCAGAGCCGCAGC | 4816 | GCUGCGGCUCUGGUGUCCC |
| siRNA 1919 | 1919 | GGACACCAGAGCCGCAGCC | 4817 | GGCUGCGGCUCUGGUGUCC |
| siRNA 1920 | 1920 | GACACCAGAGCCGCAGCCU | 4818 | AGGCUGCGGCUCUGGUGUC |
| siRNA 1921 | 1921 | ACACCAGAGCCGCAGCCUG | 4819 | CAGGCUGCGGCUCUGGUGU |
| siRNA 1922 | 1922 | CACCAGAGCCGCAGCCUGC | 4820 | GCAGGCUGCGGCUCUGGUG |
| siRNA 1923 | 1923 | ACCAGAGCCGCAGCCUGCU | 4821 | AGCAGGCUGCGGCUCUGGU |
| siRNA 1924 | 1924 | CCAGAGCCGCAGCCUGCUC | 4822 | GAGCAGGCUGCGGCUCUGG |
| siRNA 1925 | 1925 | CAGAGCCGCAGCCUGCUCU | 4823 | AGAGCAGGCUGCGGCUCUG |
| siRNA 1926 | 1926 | AGAGCCGCAGCCUGCUCUG | 4824 | CAGAGCAGGCUGCGGCUCU |
| siRNA 1927 | 1927 | GAGCCGCAGCCUGCUCUGA | 4825 | UCAGAGCAGGCUGCGGCUC |
| siRNA 1928 | 1928 | AGCCGCAGCCUGCUCUGAU | 4826 | AUCAGAGCAGGCUGCGGCU |
| siRNA 1929 | 1929 | GCCGCAGCCUGCUCUGAUU | 4827 | AAUCAGAGCAGGCUGCGGC |
| siRNA 1930 | 1930 | CCGCAGCCUGCUCUGAUUC | 4828 | GAAUCAGAGCAGGCUGCGG |
| siRNA 1931 | 1931 | CGCAGCCUGCUCUGAUUCU | 4829 | AGAAUCAGAGCAGGCUGCG |
| siRNA 1932 | 1932 | GCAGCCUGCUCUGAUUCUA | 4830 | UAGAAUCAGAGCAGGCUGC |
| SIRNA 1933 | 1933 | CAGCCUGCUCUGAUUCUAU | 4831 | AUAGAAUCAGAGCAGGCUG |
| siRNA 1934 | 1934 | AGCCUGCUCUGAUUCUAUG | 4832 | CAUAGAAUCAGAGCAGGCU |
| siRNA 1935 | 1935 | GCCUGCUCUGAUUCUAUGG | 4833 | CCAUAGAAUCAGAGCAGGC |
| siRNA 1936 | 1936 | CCUGCUCUGAUUCUAUGGC | 4834 | GCCAUAGAAUCAGAGCAGG |
| siRNA 1937 | 1937 | CUGCUCUGAUUCUAUGGCU | 4835 | AGCCAUAGAAUCAGAGCAG |
| siRNA 1938 | 1938 | UGCUCUGAUUCUAUGGCUU | 4836 | AAGCCAUAGAAUCAGAGCA |
| siRNA 1939 | 1939 | GCUCUGAUUCUAUGGCUUG | 4837 | CAAGCCAUAGAAUCAGAGC |
| siRNA 1940 | 1940 | CUCUGAUUCUAUGGCUUGG | 4838 | CCAAGCCAUAGAAUCAGAG |
| siRNA 1941 | 1941 | UCUGAUUCUAUGGCUUGGU | 4839 | ACCAAGCCAUAGAAUCAGA |
| siRNA 1942 | 1942 | CUGAUUCUAUGGCUUGGUU | 4840 | AACCAAGCCAUAGAAUCAG |
| siRNA 1943 | 1943 | UGAUUCUAUGGCUUGGUUG | 4841 | CAACCAAGCCAUAGAAUCA |
| siRNA 1944 | 1944 | GAUUCUAUGGCUUGGUUGU | 4842 | ACAACCAAGCCAUAGAAUC |
| siRNA 1945 | 1945 | AUUCUAUGGCUUGGUUGUU | 4843 | AACAACCAAGCCAUAGAAU |
| siRNA 1946 | 1946 | UUCUAUGGCUUGGUUGUUA | 4844 | UAACAACCAAGCCAUAGAA |
| siRNA 1947 | 1947 | UCUAUGGCUUGGUUGUUAC | 4845 | GUAACAACCAAGCCAUAGA |
| siRNA 1948 | 1948 | CUAUGGCUUGGUUGUUACU | 4846 | AGUAACAACCAAGCCAUAG |
| siRNA 1949 | 1949 | UAUGGCUUGGUUGUUACUA | 4847 | UAGUAACAACCAAGCCAUA |
| siRNA 1950 | 1950 | AUGGCUUGGUUGUUACUAU | 4848 | AUAGUAACAACCAAGCCAU |
| siRNA 1951 | 1951 | UGGCUUGGUUGUUACUAUA | 4849 | UAUAGUAACAACCAAGCCA |
| siRNA 1952 | 1952 | GGCUUGGUUGUUACUAUAA | 4850 | UUAUAGUAACAACCAAGCC |
| siRNA 1953 | 1953 | GCUUGGUUGUUACUAUAAG | 4851 | CUUAUAGUAACAACCAAGC |
| siRNA 1954 | 1954 | CUUGGUUGUUACUAUAAGA | 4852 | UCUUAUAGUAACAACCAAG |
| siRNA 1955 | 1955 | UUGGUUGUUACUAUAAGAG | 4853 | CUCUUAUAGUAACAACCAA |
| siRNA 1956 | 1956 | UGGUUGUUACUAUAAGAGU | 4854 | ACUCUUAUAGUAACAACCA |
| siRNA 1957 | 1957 | GGUUGUUACUAUAAGAGUA | 4855 | UACUCUUAUAGUAACAACC |
| siRNA 1958 | 1958 | GUUGUUACUAUAAGAGUAA | 4856 | UUACUCUUAUAGUAACAAC |
| siRNA 1959 | 1959 | UUGUUACUAUAAGAGUAAU | 4857 | AUUACUCUUAUAGUAACAA |
| siRNA 1960 | 1960 | UGUUACUAUAAGAGUAAUU | 4858 | AAUUACUCUUAUAGUAACA |
| siRNA 1961 | 1961 | GUUACUAUAAGAGUAAUUG | 4859 | CAAUUACUCUUAUAGUAAC |
| siRNA 1962 | 1962 | UUACUAUAAGAGUAAUUGC | 4860 | GCAAUUACUCUUAUAGUAA |
| siRNA 1963 | 1963 | UACUAUAAGAGUAAUUGCC | 4861 | GGCAAUUACUCUUAUAGUA |
| siRNA 1964 | 1964 | ACUAUAAGAGUAAUUGCCU | 4862 | AGGCAAUUACUCUUAUAGU |
| siRNA 1965 | 1965 | CUAUAAGAGUAAUUGCCUA | 4863 | UAGGCAAUUACUCUUAUAG |
| siRNA 1966 | 1966 | UAUAAGAGUAAUUGCCUAA | 4864 | UUAGGCAAUUACUCUUAUA |
| siRNA 1967 | 1967 | AUAAGAGUAAUUGCCUAAC | 4865 | GUUAGGCAAUUACUCUUAU |
| siRNA 1968 | 1968 | UAAGAGUAAUUGCCUAACU | 4866 | AGUUAGGCAAUUACUCUUA |
| siRNA 1969 | 1969 | AAGAGUAAUUGCCUAACUU | 4867 | AAGUUAGGCAAUUACUCUU |
| siRNA 1970 | 1970 | AGAGUAAUUGCCUAACUUG | 4868 | CAAGUUAGGCAAUUACUCU |
| siRNA 1971 | 1971 | GAGUAAUUGCCUAACUUGA | 4869 | UCAAGUUAGGCAAUUACUC |
| siRNA 1972 | 1972 | AGUAAUUGCCUAACUUGAU | 4870 | AUCAAGUUAGGCAAUUACU |
| siRNA 1973 | 1973 | GUAAUUGCCUAACUUGAUU | 4871 | AAUCAAGUUAGGCAAUUAC |
| siRNA 1974 | 1974 | UAAUUGCCUAACUUGAUUU | 4872 | AAAUCAAGUUAGGCAAUUA |
| siRNA 1975 | 1975 | AAUUGCCUAACUUGAUUUU | 4873 | AAAAUCAAGUUAGGCAAUU |
| siRNA 1976 | 1976 | AUUGCCUAACUUGAUUUUU | 4874 | AAAAAUCAAGUUAGGCAAU |
| siRNA 1977 | 1977 | UUGCCUAACUUGAUUUUUC | 4875 | GAAAAAUCAAGUUAGGCAA |
| siRNA 1978 | 1978 | UGCCUAACUUGAUUUUUCA | 4876 | UGAAAAAUCAAGUUAGGCA |
| siRNA 1979 | 1979 | GCCUAACUUGAUUUUUCAU | 4877 | AUGAAAAAUCAAGUUAGGC |
| siRNA 1980 | 1980 | CCUAACUUGAUUUUUCAUC | 4878 | GAUGAAAAAUCAAGUUAGG |
| siRNA 1981 | 1981 | CUAACUUGAUUUUUCAUCU | 4879 | AGAUGAAAAAUCAAGUUAG |
| siRNA 1982 | 1982 | UAACUUGAUUUUUCAUCUC | 4880 | GAGAUGAAAAAUCAAGUUA |
| siRNA 1983 | 1983 | AACUUGAUUUUUCAUCUCU | 4881 | AGAGAUGAAAAAUCAAGUU |
| siRNA 1984 | 1984 | ACUUGAUUUUUCAUCUCUU | 4882 | AAGAGAUGAAAAAUCAAGU |
| siRNA 1985 | 1985 | CUUGAUUUUUCAUCUCUUU | 4883 | AAAGAGAUGAAAAAUCAAG |
| siRNA 1986 | 1986 | UUGAUUUUUCAUCUCUUUA | 4884 | UAAAGAGAUGAAAAAUCAA |
| siRNA 1987 | 1987 | UGAUUUUUCAUCUCUUUAA | 4885 | UUAAAGAGAUGAAAAAUCA |
| siRNA 1988 | 1988 | GAUUUUUCAUCUCUUUAAC | 4886 | GUUAAAGAGAUGAAAAAUC |
| siRNA 1989 | 1989 | AUUUUUCAUCUCUUUAACC | 4887 | GGUUAAAGAGAUGAAAAAU |
| siRNA 1990 | 1990 | UUUUUCAUCUCUUUAACCA | 4888 | UGGUUAAAGAGAUGAAAAA |
| siRNA 1991 | 1991 | UUUUCAUCUCUUUAACCAA | 4889 | UUGGUUAAAGAGAUGAAAA |
| siRNA 1992 | 1992 | UUUCAUCUCUUUAACCAAA | 4890 | UUUGGUUAAAGAGAUGAAA |
| siRNA 1993 | 1993 | UUCAUCUCUUUAACCAAAC | 4891 | GUUUGGUUAAAGAGAUGAA |
| siRNA 1994 | 1994 | UCAUCUCUUUAACCAAACU | 4892 | AGUUUGGUUAAAGAGAUGA |
| siRNA 1995 | 1995 | CAUCUCUUUAACCAAACUU | 4893 | AAGUUUGGUUAAAGAGAUG |
| siRNA 1996 | 1996 | AUCUCUUUAACCAAACUUG | 4894 | CAAGUUUGGUUAAAGAGAU |
| siRNA 1997 | 1997 | UCUCUUUAACCAAACUUGU | 4895 | ACAAGUUUGGUUAAAGAGA |
| siRNA 1998 | 1998 | CUCUUUAACCAAACUUGUG | 4896 | CACAAGUUUGGUUAAAGAG |
| siRNA 1999 | 1999 | UCUUUAACCAAACUUGUGG | 4897 | CCACAAGUUUGGUUAAAGA |
| siRNA 2000 | 2000 | CUUUAACCAAACUUGUGGC | 4898 | GCCACAAGUUUGGUUAAAG |
| siRNA 2001 | 2001 | UUUAACCAAACUUGUGGCC | 4899 | GGCCACAAGUUUGGUUAAA |
| siRNA 2002 | 2002 | UUAACCAAACUUGUGGCCA | 4900 | UGGCCACAAGUUUGGUUAA |
| siRNA 2003 | 2003 | UAACCAAACUUGUGGCCAA | 4901 | UUGGCCACAAGUUUGGUUA |
| siRNA 2004 | 2004 | AACCAAACUUGUGGCCAAA | 4902 | UUUGGCCACAAGUUUGGUU |
| siRNA 2005 | 2005 | ACCAAACUUGUGGCCAAAA | 4903 | UUUUGGCCACAAGUUUGGU |
| siRNA 2006 | 2006 | CCAAACUUGUGGCCAAAAG | 4904 | CUUUUGGCCACAAGUUUGG |
| siRNA 2007 | 2007 | CAAACUUGUGGCCAAAAGA | 4905 | UCUUUUGGCCACAAGUUUG |
| siRNA 2008 | 2008 | AAACUUGUGGCCAAAAGAU | 4906 | AUCUUUUGGCCACAAGUUU |
| siRNA 2009 | 2009 | AACUUGUGGCCAAAAGAUA | 4907 | UAUCUUUUGGCCACAAGUU |
| siRNA 2010 | 2010 | ACUUGUGGCCAAAAGAUAU | 4908 | AUAUCUUUUGGCCACAAGU |
| siRNA 2011 | 2011 | CUUGUGGCCAAAAGAUAUU | 4909 | AAUAUCUUUUGGCCACAAG |
| siRNA 2012 | 2012 | UUGUGGCCAAAAGAUAUUU | 4910 | AAAUAUCUUUUGGCCACAA |
| siRNA 2013 | 2013 | UGUGGCCAAAAGAUAUUUG | 4911 | CAAAUAUCUUUUGGCCACA |
| siRNA 2014 | 2014 | GUGGCCAAAAGAUAUUUGA | 4912 | UCAAAUAUCUUUUGGCCAC |
| siRNA 2015 | 2015 | UGGCCAAAAGAUAUUUGAC | 4913 | GUCAAAUAUCUUUUGGCCA |
| siRNA 2016 | 2016 | GGCCAAAAGAUAUUUGACC | 4914 | GGUCAAAUAUCUUUUGGCC |
| siRNA 2017 | 2017 | GCCAAAAGAUAUUUGACCG | 4915 | CGGUCAAAUAUCUUUUGGC |
| siRNA 2018 | 2018 | CCAAAAGAUAUUUGACCGU | 4916 | ACGGUCAAAUAUCUUUUGG |
| siRNA 2019 | 2019 | CAAAAGAUAUUUGACCGUU | 4917 | AACGGUCAAAUAUCUUUUG |
| siRNA 2020 | 2020 | AAAAGAUAUUUGACCGUUU | 4918 | AAACGGUCAAAUAUCUUUU |
| siRNA 2021 | 2021 | AAAGAUAUUUGACCGUUUC | 4919 | GAAACGGUCAAAUAUCUUU |
| siRNA 2022 | 2022 | AAGAUAUUUGACCGUUUCC | 4920 | GGAAACGGUCAAAUAUCUU |
| siRNA 2023 | 2023 | AGAUAUUUGACCGUUUCCA | 4921 | UGGAAACGGUCAAAUAUCU |
| siRNA 2024 | 2024 | GAUAUUUGACCGUUUCCAA | 4922 | UUGGAAACGGUCAAAUAUC |
| siRNA 2025 | 2025 | AUAUUUGACCGUUUCCAAA | 4923 | UUUGGAAACGGUCAAAUAU |
| siRNA 2026 | 2026 | UAUUUGACCGUUUCCAAAA | 4924 | UUUUGGAAACGGUCAAAUA |
| siRNA 2027 | 2027 | AUUUGACCGUUUCCAAAAU | 4925 | AUUUUGGAAACGGUCAAAU |
| siRNA 2028 | 2028 | UUUGACCGUUUCCAAAAUU | 4926 | AAUUUUGGAAACGGUCAAA |
| siRNA 2029 | 2029 | UUGACCGUUUCCAAAAUUC | 4927 | GAAUUUUGGAAACGGUCAA |
| siRNA 2030 | 2030 | UGACCGUUUCCAAAAUUCA | 4928 | UGAAUUUUGGAAACGGUCA |
| siRNA 2031 | 2031 | GACCGUUUCCAAAAUUCAG | 4929 | CUGAAUUUUGGAAACGGUC |
| siRNA 2032 | 2032 | ACCGUUUCCAAAAUUCAGA | 4930 | UCUGAAUUUUGGAAACGGU |
| siRNA 2033 | 2033 | CCGUUUCCAAAAUUCAGAU | 4931 | AUCUGAAUUUUGGAAACGG |
| siRNA 2034 | 2034 | CGUUUCCAAAAUUCAGAUU | 4932 | AAUCUGAAUUUUGGAAACG |
| siRNA 2035 | 2035 | GUUUCCAAAAUUCAGAUUC | 4933 | GAAUCUGAAUUUUGGAAAC |
| siRNA 2036 | 2036 | UUUCCAAAAUUCAGAUUCU | 4934 | AGAAUCUGAAUUUUGGAAA |
| siRNA 2037 | 2037 | UUCCAAAAUUCAGAUUCUG | 4935 | CAGAAUCUGAAUUUUGGAA |
| siRNA 2038 | 2038 | UCCAAAAUUCAGAUUCUGC | 4936 | GCAGAAUCUGAAUUUUGGA |
| siRNA 2039 | 2039 | CCAAAAUUCAGAUUCUGCC | 4937 | GGCAGAAUCUGAAUUUUGG |
| siRNA 2040 | 2040 | CAAAAUUCAGAUUCUGCCU | 4938 | AGGCAGAAUCUGAAUUUUG |
| siRNA 2041 | 2041 | AAAAUUCAGAUUCUGCCUC | 4939 | GAGGCAGAAUCUGAAUUUU |
| siRNA 2042 | 2042 | AAAUUCAGAUUCUGCCUCU | 4940 | AGAGGCAGAAUCUGAAUUU |
| siRNA 2043 | 2043 | AAUUCAGAUUCUGCCUCUG | 4941 | CAGAGGCAGAAUCUGAAUU |
| siRNA 2044 | 2044 | AUUCAGAUUCUGCCUCUGC | 4942 | GCAGAGGCAGAAUCUGAAU |
| siRNA 2045 | 2045 | UUCAGAUUCUGCCUCUGCG | 4943 | CGCAGAGGCAGAAUCUGAA |
| siRNA 2046 | 2046 | UCAGAUUCUGCCUCUGCGG | 4944 | CCGCAGAGGCAGAAUCUGA |
| siRNA 2047 | 2047 | CAGAUUCUGCCUCUGCGGA | 4945 | UCCGCAGAGGCAGAAUCUG |
| siRNA 2048 | 2048 | AGAUUCUGCCUCUGCGGAU | 4946 | AUCCGCAGAGGCAGAAUCU |
| siRNA 2049 | 2049 | GAUUCUGCCUCUGCGGAUA | 4947 | UAUCCGCAGAGGCAGAAUC |
| siRNA 2050 | 2050 | AUUCUGCCUCUGCGGAUAA | 4948 | UUAUCCGCAGAGGCAGAAU |
| siRNA 2051 | 2051 | UUCUGCCUCUGCGGAUAAA | 4949 | UUUAUCCGCAGAGGCAGAA |
| siRNA 2052 | 2052 | UCUGCCUCUGCGGAUAAAU | 4950 | AUUUAUCCGCAGAGGCAGA |
| siRNA 2053 | 2053 | CUGCCUCUGCGGAUAAAUA | 4951 | UAUUUAUCCGCAGAGGCAG |
| siRNA 2054 | 2054 | UGCCUCUGCGGAUAAAUAU | 4952 | AUAUUUAUCCGCAGAGGCA |
| siRNA 2055 | 2055 | GCCUCUGCGGAUAAAUAUU | 4953 | AAUAUUUAUCCGCAGAGGC |
| siRNA 2056 | 2056 | CCUCUGCGGAUAAAUAUUU | 4954 | AAAUAUUUAUCCGCAGAGG |
| siRNA 2057 | 2057 | CUCUGCGGAUAAAUAUUUG | 4955 | CAAAUAUUUAUCCGCAGAG |
| siRNA 2058 | 2058 | UCUGCGGAUAAAUAUUUGC | 4956 | GCAAAUAUUUAUCCGCAGA |
| siRNA 2059 | 2059 | CUGCGGAUAAAUAUUUGCC | 4957 | GGCAAAUAUUUAUCCGCAG |
| siRNA 2060 | 2060 | UGCGGAUAAAUAUUUGCCA | 4958 | UGGCAAAUAUUUAUCCGCA |
| siRNA 2061 | 2061 | GCGGAUAAAUAUUUGCCAC | 4959 | GUGGCAAAUAUUUAUCCGC |
| siRNA 2062 | 2062 | CGGAUAAAUAUUUGCCACG | 4960 | CGUGGCAAAUAUUUAUCCG |
| siRNA 2063 | 2063 | GGAUAAAUAUUUGCCACGA | 4961 | UCGUGGCAAAUAUUUAUCC |
| siRNA 2064 | 2064 | GAUAAAUAUUUGCCACGAA | 4962 | UUCGUGGCAAAUAUUUAUC |
| siRNA 2065 | 2065 | AUAAAUAUUUGCCACGAAU | 4963 | AUUCGUGGCAAAUAUUUAU |
| siRNA 2066 | 2066 | UAAAUAUUUGCCACGAAUG | 4964 | CAUUCGUGGCAAAUAUUUA |
| siRNA 2067 | 2067 | AAAUAUUUGCCACGAAUGA | 4965 | UCAUUCGUGGCAAAUAUUU |
| siRNA 2068 | 2068 | AAUAUUUGCCACGAAUGAG | 4966 | CUCAUUCGUGGCAAAUAUU |
| siRNA 2069 | 2069 | AUAUUUGCCACGAAUGAGU | 4967 | ACUCAUUCGUGGCAAAUAU |
| siRNA 2070 | 2070 | UAUUUGCCACGAAUGAGUA | 4968 | UACUCAUUCGUGGCAAAUA |
| siRNA 2071 | 2071 | AUUUGCCACGAAUGAGUAA | 4969 | UUACUCAUUCGUGGCAAAU |
| siRNA 2072 | 2072 | UUUGCCACGAAUGAGUAAC | 4970 | GUUACUCAUUCGUGGCAAA |
| siRNA 2073 | 2073 | UUGCCACGAAUGAGUAACU | 4971 | AGUUACUCAUUCGUGGCAA |
| siRNA 2074 | 2074 | UGCCACGAAUGAGUAACUC | 4972 | GAGUUACUCAUUCGUGGCA |
| siRNA 2075 | 2075 | GCCACGAAUGAGUAACUCC | 4973 | GGAGUUACUCAUUCGUGGC |
| siRNA 2076 | 2076 | CCACGAAUGAGUAACUCCU | 4974 | AGGAGUUACUCAUUCGUGG |
| siRNA 2077 | 2077 | CACGAAUGAGUAACUCCUG | 4975 | CAGGAGUUACUCAUUCGUG |
| siRNA 2078 | 2078 | ACGAAUGAGUAACUCCUGU | 4976 | ACAGGAGUUACUCAUUCGU |
| siRNA 2079 | 2079 | CGAAUGAGUAACUCCUGUC | 4977 | GACAGGAGUUACUCAUUCG |
| siRNA 2080 | 2080 | GAAUGAGUAACUCCUGUCA | 4978 | UGACAGGAGUUACUCAUUC |
| siRNA 2081 | 2081 | AAUGAGUAACUCCUGUCAC | 4979 | GUGACAGGAGUUACUCAUU |
| siRNA 2082 | 2082 | AUGAGUAACUCCUGUCACC | 4980 | GGUGACAGGAGUUACUCAU |
| siRNA 2083 | 2083 | UGAGUAACUCCUGUCACCA | 4981 | UGGUGACAGGAGUUACUCA |
| siRNA 2084 | 2084 | GAGUAACUCCUGUCACCAC | 4982 | GUGGUGACAGGAGUUACUC |
| siRNA 2085 | 2085 | AGUAACUCCUGUCACCACU | 4983 | AGUGGUGACAGGAGUUACU |
| siRNA 2086 | 2086 | GUAACUCCUGUCACCACUC | 4984 | GAGUGGUGACAGGAGUUAC |
| siRNA 2087 | 2087 | UAACUCCUGUCACCACUCU | 4985 | AGAGUGGUGACAGGAGUUA |
| siRNA 2088 | 2088 | AACUCCUGUCACCACUCUG | 4986 | CAGAGUGGUGACAGGAGUU |
| siRNA 2089 | 2089 | ACUCCUGUCACCACUCUGA | 4987 | UCAGAGUGGUGACAGGAGU |
| siRNA 2090 | 2090 | CUCCUGUCACCACUCUGAA | 4988 | UUCAGAGUGGUGACAGGAG |
| siRNA 2091 | 2091 | UCCUGUCACCACUCUGAAG | 4989 | CUUCAGAGUGGUGACAGGA |
| siRNA 2092 | 2092 | CCUGUCACCACUCUGAAGG | 4990 | CCUUCAGAGUGGUGACAGG |
| siRNA 2093 | 2093 | CUGUCACCACUCUGAAGGU | 4991 | ACCUUCAGAGUGGUGACAG |
| siRNA 2094 | 2094 | UGUCACCACUCUGAAGGUC | 4992 | GACCUUCAGAGUGGUGACA |
| siRNA 2095 | 2095 | GUCACCACUCUGAAGGUCC | 4993 | GGACCUUCAGAGUGGUGAC |
| siRNA 2096 | 2096 | UCACCACUCUGAAGGUCCA | 4994 | UGGACCUUCAGAGUGGUGA |
| siRNA 2097 | 2097 | CACCACUCUGAAGGUCCAG | 4995 | CUGGACCUUCAGAGUGGUG |
| siRNA 2098 | 2098 | ACCACUCUGAAGGUCCAGA | 4996 | UCUGGACCUUCAGAGUGGU |
| siRNA 2099 | 2099 | CCACUCUGAAGGUCCAGAC | 4997 | GUCUGGACCUUCAGAGUGG |
| siRNA 2100 | 2100 | CACUCUGAAGGUCCAGACA | 4998 | UGUCUGGACCUUCAGAGUG |
| siRNA 2101 | 2101 | ACUCUGAAGGUCCAGACAG | 4999 | CUGUCUGGACCUUCAGAGU |
| siRNA 2102 | 2102 | CUCUGAAGGUCCAGACAGA | 5000 | UCUGUCUGGACCUUCAGAG |
| siRNA 2103 | 2103 | UCUGAAGGUCCAGACAGAA | 5001 | UUCUGUCUGGACCUUCAGA |
| siRNA 2104 | 2104 | CUGAAGGUCCAGACAGAAG | 5002 | CUUCUGUCUGGACCUUCAG |
| siRNA 2105 | 2105 | UGAAGGUCCAGACAGAAGG | 5003 | CCUUCUGUCUGGACCUUCA |
| siRNA 2106 | 2106 | GAAGGUCCAGACAGAAGGU | 5004 | ACCUUCUGUCUGGACCUUC |
| siRNA 2107 | 2107 | AAGGUCCAGACAGAAGGUU | 5005 | AACCUUCUGUCUGGACCUU |
| siRNA 2108 | 2108 | AGGUCCAGACAGAAGGUUU | 5006 | AAACCUUCUGUCUGGACCU |
| SiRNA 2109 | 2109 | GGUCCAGACAGAAGGUUUU | 5007 | AAAACCUUCUGUCUGGACC |
| siRNA 2110 | 2110 | GUCCAGACAGAAGGUUUUG | 5008 | CAAAACCUUCUGUCUGGAC |
| siRNA 2111 | 2111 | UCCAGACAGAAGGUUUUGA | 5009 | UCAAAACCUUCUGUCUGGA |
| siRNA 2112 | 2112 | CCAGACAGAAGGUUUUGAC | 5010 | GUCAAAACCUUCUGUCUGG |
| siRNA 2113 | 2113 | CAGACAGAAGGUUUUGACA | 5011 | UGUCAAAACCUUCUGUCUG |
| siRNA 2114 | 2114 | AGACAGAAGGUUUUGACAC | 5012 | GUGUCAAAACCUUCUGUCU |
| siRNA 2115 | 2115 | GACAGAAGGUUUUGACACA | 5013 | UGUGUCAAAACCUUCUGUC |
| siRNA 2116 | 2116 | ACAGAAGGUUUUGACACAU | 5014 | AUGUGUCAAAACCUUCUGU |
| siRNA 2117 | 2117 | CAGAAGGUUUUGACACAUU | 5015 | AAUGUGUCAAAACCUUCUG |
| siRNA 2118 | 2118 | AGAAGGUUUUGACACAUUC | 5016 | GAAUGUGUCAAAACCUUCU |
| siRNA 2119 | 2119 | GAAGGUUUUGACACAUUCU | 5017 | AGAAUGUGUCAAAACCUUC |
| siRNA 2120 | 2120 | AAGGUUUUGACACAUUCUU | 5018 | AAGAAUGUGUCAAAACCUU |
| siRNA 2121 | 2121 | AGGUUUUGACACAUUCUUA | 5019 | UAAGAAUGUGUCAAAACCU |
| siRNA 2122 | 2122 | GGUUUUGACACAUUCUUAG | 5020 | CUAAGAAUGUGUCAAAACC |
| siRNA 2123 | 2123 | GUUUUGACACAUUCUUAGC | 5021 | GCUAAGAAUGUGUCAAAAC |
| siRNA 2124 | 2124 | UUUUGACACAUUCUUAGCA | 5022 | UGCUAAGAAUGUGUCAAAA |
| siRNA 2125 | 2125 | UUUGACACAUUCUUAGCAC | 5023 | GUGCUAAGAAUGUGUCAAA |
| siRNA 2126 | 2126 | UUGACACAUUCUUAGCACU | 5024 | AGUGCUAAGAAUGUGUCAA |
| siRNA 2127 | 2127 | UGACACAUUCUUAGCACUG | 5025 | CAGUGCUAAGAAUGUGUCA |
| siRNA 2128 | 2128 | GACACAUUCUUAGCACUGA | 5026 | UCAGUGCUAAGAAUGUGUC |
| siRNA 2129 | 2129 | ACACAUUCUUAGCACUGAA | 5027 | UUCAGUGCUAAGAAUGUGU |
| siRNA 2130 | 2130 | CACAUUCUUAGCACUGAAC | 5028 | GUUCAGUGCUAAGAAUGUG |
| siRNA 2131 | 2131 | ACAUUCUUAGCACUGAACU | 5029 | AGUUCAGUGCUAAGAAUGU |
| siRNA 2132 | 2132 | CAUUCUUAGCACUGAACUC | 5030 | GAGUUCAGUGCUAAGAAUG |
| siRNA 2133 | 2133 | AUUCUUAGCACUGAACUCC | 5031 | GGAGUUCAGUGCUAAGAAU |
| siRNA 2134 | 2134 | UUCUUAGCACUGAACUCCU | 5032 | AGGAGUUCAGUGCUAAGAA |
| siRNA 2135 | 2135 | UCUUAGCACUGAACUCCUC | 5033 | GAGGAGUUCAGUGCUAAGA |
| siRNA 2136 | 2136 | CUUAGCACUGAACUCCUCU | 5034 | AGAGGAGUUCAGUGCUAAG |
| siRNA 2137 | 2137 | UUAGCACUGAACUCCUCUG | 5035 | CAGAGGAGUUCAGUGCUAA |
| siRNA 2138 | 2138 | UAGCACUGAACUCCUCUGU | 5036 | ACAGAGGAGUUCAGUGCUA |
| siRNA 2139 | 2139 | AGCACUGAACUCCUCUGUG | 5037 | CACAGAGGAGUUCAGUGCU |
| siRNA 2140 | 2140 | GCACUGAACUCCUCUGUGA | 5038 | UCACAGAGGAGUUCAGUGC |
| siRNA 2141 | 2141 | CACUGAACUCCUCUGUGAU | 5039 | AUCACAGAGGAGUUCAGUG |
| siRNA 2142 | 2142 | ACUGAACUCCUCUGUGAUC | 5040 | GAUCACAGAGGAGUUCAGU |
| siRNA 2143 | 2143 | CUGAACUCCUCUGUGAUCU | 5041 | AGAUCACAGAGGAGUUCAG |
| siRNA 2144 | 2144 | UGAACUCCUCUGUGAUCUA | 5042 | UAGAUCACAGAGGAGUUCA |
| siRNA 2145 | 2145 | GAACUCCUCUGUGAUCUAG | 5043 | CUAGAUCACAGAGGAGUUC |
| siRNA 2146 | 2146 | AACUCCUCUGUGAUCUAGG | 5044 | CCUAGAUCACAGAGGAGUU |
| siRNA 2147 | 2147 | ACUCCUCUGUGAUCUAGGA | 5045 | UCCUAGAUCACAGAGGAGU |
| siRNA 2148 | 2148 | CUCCUCUGUGAUCUAGGAU | 5046 | AUCCUAGAUCACAGAGGAG |
| siRNA 2149 | 2149 | UCCUCUGUGAUCUAGGAUG | 5047 | CAUCCUAGAUCACAGAGGA |
| siRNA 2150 | 2150 | CCUCUGUGAUCUAGGAUGA | 5048 | UCAUCCUAGAUCACAGAGG |
| siRNA 2151 | 2151 | CUCUGUGAUCUAGGAUGAU | 5049 | AUCAUCCUAGAUCACAGAG |
| siRNA 2152 | 2152 | UCUGUGAUCUAGGAUGAUC | 5050 | GAUCAUCCUAGAUCACAGA |
| siRNA 2153 | 2153 | CUGUGAUCUAGGAUGAUCU | 5051 | AGAUCAUCCUAGAUCACAG |
| siRNA 2154 | 2154 | UGUGAUCUAGGAUGAUCUG | 5052 | CAGAUCAUCCUAGAUCACA |
| siRNA 2155 | 2155 | GUGAUCUAGGAUGAUCUGU | 5053 | ACAGAUCAUCCUAGAUCAC |
| siRNA 2156 | 2156 | UGAUCUAGGAUGAUCUGUU | 5054 | AACAGAUCAUCCUAGAUCA |
| siRNA 2157 | 2157 | GAUCUAGGAUGAUCUGUUC | 5055 | GAACAGAUCAUCCUAGAUC |
| siRNA 2158 | 2158 | AUCUAGGAUGAUCUGUUCC | 5056 | GGAACAGAUCAUCCUAGAU |
| siRNA 2159 | 2159 | UCUAGGAUGAUCUGUUCCC | 5057 | GGGAACAGAUCAUCCUAGA |
| siRNA 2160 | 2160 | CUAGGAUGAUCUGUUCCCC | 5058 | GGGGAACAGAUCAUCCUAG |
| siRNA 2161 | 2161 | UAGGAUGAUCUGUUCCCCC | 5059 | GGGGGAACAGAUCAUCCUA |
| siRNA 2162 | 2162 | AGGAUGAUCUGUUCCCCCU | 5060 | AGGGGGAACAGAUCAUCCU |
| siRNA 2163 | 2163 | GGAUGAUCUGUUCCCCCUC | 5061 | GAGGGGGAACAGAUCAUCC |
| siRNA 2164 | 2164 | GAUGAUCUGUUCCCCCUCU | 5062 | AGAGGGGGAACAGAUCAUC |
| siRNA 2165 | 2165 | AUGAUCUGUUCCCCCUCUG | 5063 | CAGAGGGGGAACAGAUCAU |
| siRNA 2166 | 2166 | UGAUCUGUUCCCCCUCUGA | 5064 | UCAGAGGGGGAACAGAUCA |
| siRNA 2167 | 2167 | GAUCUGUUCCCCCUCUGAU | 5065 | AUCAGAGGGGGAACAGAUC |
| siRNA 2168 | 2168 | AUCUGUUCCCCCUCUGAUG | 5066 | CAUCAGAGGGGGAACAGAU |
| siRNA 2169 | 2169 | UCUGUUCCCCCUCUGAUGA | 5067 | UCAUCAGAGGGGGAACAGA |
| siRNA 2170 | 2170 | CUGUUCCCCCUCUGAUGAA | 5068 | UUCAUCAGAGGGGGAACAG |
| siRNA 2171 | 2171 | UGUUCCCCCUCUGAUGAAC | 5069 | GUUCAUCAGAGGGGGAACA |
| siRNA 2172 | 2172 | GUUCCCCCUCUGAUGAACA | 5070 | UGUUCAUCAGAGGGGGAAC |
| siRNA 2173 | 2173 | UUCCCCCUCUGAUGAACAU | 5071 | AUGUUCAUCAGAGGGGGAA |
| siRNA 2174 | 2174 | UCCCCCUCUGAUGAACAUC | 5072 | GAUGUUCAUCAGAGGGGGA |
| siRNA 2175 | 2175 | CCCCCUCUGAUGAACAUCC | 5073 | GGAUGUUCAUCAGAGGGGG |
| siRNA 2176 | 2176 | CCCCUCUGAUGAACAUCCU | 5074 | AGGAUGUUCAUCAGAGGGG |
| siRNA 2177 | 2177 | CCCUCUGAUGAACAUCCUC | 5075 | GAGGAUGUUCAUCAGAGGG |
| siRNA 2178 | 2178 | CCUCUGAUGAACAUCCUCU | 5076 | AGAGGAUGUUCAUCAGAGG |
| siRNA 2179 | 2179 | CUCUGAUGAACAUCCUCUG | 5077 | CAGAGGAUGUUCAUCAGAG |
| siRNA 2180 | 2180 | UCUGAUGAACAUCCUCUGA | 5078 | UCAGAGGAUGUUCAUCAGA |
| siRNA 2181 | 2181 | CUGAUGAACAUCCUCUGAU | 5079 | AUCAGAGGAUGUUCAUCAG |
| siRNA 2182 | 2182 | UGAUGAACAUCCUCUGAUG | 5080 | CAUCAGAGGAUGUUCAUCA |
| siRNA 2183 | 2183 | GAUGAACAUCCUCUGAUGA | 5081 | UCAUCAGAGGAUGUUCAUC |
| siRNA 2184 | 2184 | AUGAACAUCCUCUGAUGAU | 5082 | AUCAUCAGAGGAUGUUCAU |
| siRNA 2185 | 2185 | UGAACAUCCUCUGAUGAUC | 5083 | GAUCAUCAGAGGAUGUUCA |
| siRNA 2186 | 2186 | GAACAUCCUCUGAUGAUCU | 5084 | AGAUCAUCAGAGGAUGUUC |
| siRNA 2187 | 2187 | AACAUCCUCUGAUGAUCUA | 5085 | UAGAUCAUCAGAGGAUGUU |
| siRNA 2188 | 2188 | ACAUCCUCUGAUGAUCUAG | 5086 | CUAGAUCAUCAGAGGAUGU |
| siRNA 2189 | 2189 | CAUCCUCUGAUGAUCUAGG | 5087 | CCUAGAUCAUCAGAGGAUG |
| siRNA 2190 | 2190 | AUCCUCUGAUGAUCUAGGC | 5088 | GCCUAGAUCAUCAGAGGAU |
| siRNA 2191 | 2191 | UCCUCUGAUGAUCUAGGCU | 5089 | AGCCUAGAUCAUCAGAGGA |
| siRNA 2192 | 2192 | CCUCUGAUGAUCUAGGCUC | 5090 | GAGCCUAGAUCAUCAGAGG |
| siRNA 2193 | 2193 | CUCUGAUGAUCUAGGCUCC | 5091 | GGAGCCUAGAUCAUCAGAG |
| siRNA 2194 | 2194 | UCUGAUGAUCUAGGCUCCC | 5092 | GGGAGCCUAGAUCAUCAGA |
| siRNA 2195 | 2195 | CUGAUGAUCUAGGCUCCCA | 5093 | UGGGAGCCUAGAUCAUCAG |
| siRNA 2196 | 2196 | UGAUGAUCUAGGCUCCCAG | 5094 | CUGGGAGCCUAGAUCAUCA |
| siRNA 2197 | 2197 | GAUGAUCUAGGCUCCCAGC | 5095 | GCUGGGAGCCUAGAUCAUC |
| siRNA 2198 | 2198 | AUGAUCUAGGCUCCCAGCA | 5096 | UGCUGGGAGCCUAGAUCAU |
| siRNA 2199 | 2199 | UGAUCUAGGCUCCCAGCAG | 5097 | CUGCUGGGAGCCUAGAUCA |
| SIRNA 2200 | 2200 | GAUCUAGGCUCCCAGCAGG | 5098 | CCUGCUGGGAGCCUAGAUC |
| siRNA 2201 | 2201 | AUCUAGGCUCCCAGCAGGC | 5099 | GCCUGCUGGGAGCCUAGAU |
| siRNA 2202 | 2202 | UCUAGGCUCCCAGCAGGCU | 5100 | AGCCUGCUGGGAGCCUAGA |
| siRNA 2203 | 2203 | CUAGGCUCCCAGCAGGCUA | 5101 | UAGCCUGCUGGGAGCCUAG |
| siRNA 2204 | 2204 | UAGGCUCCCAGCAGGCUAC | 5102 | GUAGCCUGCUGGGAGCCUA |
| siRNA 2205 | 2205 | AGGCUCCCAGCAGGCUACU | 5103 | AGUAGCCUGCUGGGAGCCU |
| siRNA 2206 | 2206 | GGCUCCCAGCAGGCUACUU | 5104 | AAGUAGCCUGCUGGGAGCC |
| siRNA 2207 | 2207 | GCUCCCAGCAGGCUACUUU | 5105 | AAAGUAGCCUGCUGGGAGC |
| siRNA 2208 | 2208 | CUCCCAGCAGGCUACUUUG | 5106 | CAAAGUAGCCUGCUGGGAG |
| siRNA 2209 | 2209 | UCCCAGCAGGCUACUUUGA | 5107 | UCAAAGUAGCCUGCUGGGA |
| siRNA 2210 | 2210 | CCCAGCAGGCUACUUUGAA | 5108 | UUCAAAGUAGCCUGCUGGG |
| siRNA 2211 | 2211 | CCAGCAGGCUACUUUGAAG | 5109 | CUUCAAAGUAGCCUGCUGG |
| siRNA 2212 | 2212 | CAGCAGGCUACUUUGAAGG | 5110 | CCUUCAAAGUAGCCUGCUG |
| siRNA 2213 | 2213 | AGCAGGCUACUUUGAAGGG | 5111 | CCCUUCAAAGUAGCCUGCU |
| siRNA 2214 | 2214 | GCAGGCUACUUUGAAGGGA | 5112 | UCCCUUCAAAGUAGCCUGC |
| siRNA 2215 | 2215 | CAGGCUACUUUGAAGGGAA | 5113 | UUCCCUUCAAAGUAGCCUG |
| siRNA 2216 | 2216 | AGGCUACUUUGAAGGGAAC | 5114 | GUUCCCUUCAAAGUAGCCU |
| siRNA 2217 | 2217 | GGCUACUUUGAAGGGAACA | 5115 | UGUUCCCUUCAAAGUAGCC |
| siRNA 2218 | 2218 | GCUACUUUGAAGGGAACAA | 5116 | UUGUUCCCUUCAAAGUAGC |
| siRNA 2219 | 2219 | CUACUUUGAAGGGAACAAU | 5117 | AUUGUUCCCUUCAAAGUAG |
| siRNA 2220 | 2220 | UACUUUGAAGGGAACAAUC | 5118 | GAUUGUUCCCUUCAAAGUA |
| siRNA 2221 | 2221 | ACUUUGAAGGGAACAAUCA | 5119 | UGAUUGUUCCCUUCAAAGU |
| siRNA 2222 | 2222 | CUUUGAAGGGAACAAUCAG | 5120 | CUGAUUGUUCCCUUCAAAG |
| siRNA 2223 | 2223 | UUUGAAGGGAACAAUCAGA | 5121 | UCUGAUUGUUCCCUUCAAA |
| siRNA 2224 | 2224 | UUGAAGGGAACAAUCAGAU | 5122 | AUCUGAUUGUUCCCUUCAA |
| siRNA 2225 | 2225 | UGAAGGGAACAAUCAGAUG | 5123 | CAUCUGAUUGUUCCCUUCA |
| siRNA 2226 | 2226 | GAAGGGAACAAUCAGAUGC | 5124 | GCAUCUGAUUGUUCCCUUC |
| siRNA 2227 | 2227 | AAGGGAACAAUCAGAUGCA | 5125 | UGCAUCUGAUUGUUCCCUU |
| siRNA 2228 | 2228 | AGGGAACAAUCAGAUGCAA | 5126 | UUGCAUCUGAUUGUUCCCU |
| siRNA 2229 | 2229 | GGGAACAAUCAGAUGCAAA | 5127 | UUUGCAUCUGAUUGUUCCC |
| siRNA 2230 | 2230 | GGAACAAUCAGAUGCAAAA | 5128 | UUUUGCAUCUGAUUGUUCC |
| siRNA 2231 | 2231 | GAACAAUCAGAUGCAAAAG | 5129 | CUUUUGCAUCUGAUUGUUC |
| siRNA 2232 | 2232 | AACAAUCAGAUGCAAAAGC | 5130 | GCUUUUGCAUCUGAUUGUU |
| siRNA 2233 | 2233 | ACAAUCAGAUGCAAAAGCU | 5131 | AGCUUUUGCAUCUGAUUGU |
| siRNA 2234 | 2234 | CAAUCAGAUGCAAAAGCUC | 5132 | GAGCUUUUGCAUCUGAUUG |
| siRNA 2235 | 2235 | AAUCAGAUGCAAAAGCUCU | 5133 | AGAGCUUUUGCAUCUGAUU |
| siRNA 2236 | 2236 | AUCAGAUGCAAAAGCUCUU | 5134 | AAGAGCUUUUGCAUCUGAU |
| siRNA 2237 | 2237 | UCAGAUGCAAAAGCUCUUG | 5135 | CAAGAGCUUUUGCAUCUGA |
| siRNA 2238 | 2238 | CAGAUGCAAAAGCUCUUGG | 5136 | CCAAGAGCUUUUGCAUCUG |
| siRNA 2239 | 2239 | AGAUGCAAAAGCUCUUGGG | 5137 | CCCAAGAGCUUUUGCAUCU |
| siRNA 2240 | 2240 | GAUGCAAAAGCUCUUGGGU | 5138 | ACCCAAGAGCUUUUGCAUC |
| siRNA 2241 | 2241 | AUGCAAAAGCUCUUGGGUG | 5139 | CACCCAAGAGCUUUUGCAU |
| siRNA 2242 | 2242 | UGCAAAAGCUCUUGGGUGU | 5140 | ACACCCAAGAGCUUUUGCA |
| siRNA 2243 | 2243 | GCAAAAGCUCUUGGGUGUU | 5141 | AACACCCAAGAGCUUUUGC |
| siRNA 2244 | 2244 | CAAAAGCUCUUGGGUGUUU | 5142 | AAACACCCAAGAGCUUUUG |
| siRNA 2245 | 2245 | AAAAGCUCUUGGGUGUUUA | 5143 | UAAACACCCAAGAGCUUUU |
| siRNA 2246 | 2246 | AAAGCUCUUGGGUGUUUAU | 5144 | AUAAACACCCAAGAGCUUU |
| siRNA 2247 | 2247 | AAGCUCUUGGGUGUUUAUU | 5145 | AAUAAACACCCAAGAGCUU |
| siRNA 2248 | 2248 | AGCUCUUGGGUGUUUAUUU | 5146 | AAAUAAACACCCAAGAGCU |
| siRNA 2249 | 2249 | GCUCUUGGGUGUUUAUUUA | 5147 | UAAAUAAACACCCAAGAGC |
| siRNA 2250 | 2250 | CUCUUGGGUGUUUAUUUAA | 5148 | UUAAAUAAACACCCAAGAG |
| siRNA 2251 | 2251 | UCUUGGGUGUUUAUUUAAA | 5149 | UUUAAAUAAACACCCAAGA |
| siRNA 2252 | 2252 | CUUGGGUGUUUAUUUAAAA | 5150 | UUUUAAAUAAACACCCAAG |
| siRNA 2253 | 2253 | UUGGGUGUUUAUUUAAAAU | 5151 | AUUUUAAAUAAACACCCAA |
| siRNA 2254 | 2254 | UGGGUGUUUAUUUAAAAUA | 5152 | UAUUUUAAAUAAACACCCA |
| siRNA 2255 | 2255 | GGGUGUUUAUUUAAAAUAC | 5153 | GUAUUUUAAAUAAACACCC |
| siRNA 2256 | 2256 | GGUGUUUAUUUAAAAUACU | 5154 | AGUAUUUUAAAUAAACACC |
| siRNA 2257 | 2257 | GUGUUUAUUUAAAAUACUA | 5155 | UAGUAUUUUAAAUAAACAC |
| siRNA 2258 | 2258 | UGUUUAUUUAAAAUACUAG | 5156 | CUAGUAUUUUAAAUAAACA |
| siRNA 2259 | 2259 | GUUUAUUUAAAAUACUAGU | 5157 | ACUAGUAUUUUAAAUAAAC |
| siRNA 2260 | 2260 | UUUAUUUAAAAUACUAGUG | 5158 | CACUAGUAUUUUAAAUAAA |
| siRNA 2261 | 2261 | UUAUUUAAAAUACUAGUGU | 5159 | ACACUAGUAUUUUAAAUAA |
| siRNA 2262 | 2262 | UAUUUAAAAUACUAGUGUC | 5160 | GACACUAGUAUUUUAAAUA |
| siRNA 2263 | 2263 | AUUUAAAAUACUAGUGUCA | 5161 | UGACACUAGUAUUUUAAAU |
| siRNA 2264 | 2264 | UUUAAAAUACUAGUGUCAC | 5162 | GUGACACUAGUAUUUUAAA |
| siRNA 2265 | 2265 | UUAAAAUACUAGUGUCACU | 5163 | AGUGACACUAGUAUUUUAA |
| siRNA 2266 | 2266 | UAAAAUACUAGUGUCACUU | 5164 | AAGUGACACUAGUAUUUUA |
| siRNA 2267 | 2267 | AAAAUACUAGUGUCACUUU | 5165 | AAAGUGACACUAGUAUUUU |
| siRNA 2268 | 2268 | AAAUACUAGUGUCACUUUC | 5166 | GAAAGUGACACUAGUAUUU |
| siRNA 2269 | 2269 | AAUACUAGUGUCACUUUCU | 5167 | AGAAAGUGACACUAGUAUU |
| siRNA 2270 | 2270 | AUACUAGUGUCACUUUCUG | 5168 | CAGAAAGUGACACUAGUAU |
| siRNA 2271 | 2271 | UACUAGUGUCACUUUCUGA | 5169 | UCAGAAAGUGACACUAGUA |
| siRNA 2272 | 2272 | ACUAGUGUCACUUUCUGAG | 5170 | CUCAGAAAGUGACACUAGU |
| siRNA 2273 | 2273 | CUAGUGUCACUUUCUGAGU | 5171 | ACUCAGAAAGUGACACUAG |
| siRNA 2274 | 2274 | UAGUGUCACUUUCUGAGUA | 5172 | UACUCAGAAAGUGACACUA |
| siRNA 2275 | 2275 | AGUGUCACUUUCUGAGUAC | 5173 | GUACUCAGAAAGUGACACU |
| siRNA 2276 | 2276 | GUGUCACUUUCUGAGUACC | 5174 | GGUACUCAGAAAGUGACAC |
| SiRNA 2277 | 2277 | UGUCACUUUCUGAGUACCC | 5175 | GGGUACUCAGAAAGUGACA |
| siRNA 2278 | 2278 | GUCACUUUCUGAGUACCCG | 5176 | CGGGUACUCAGAAAGUGAC |
| siRNA 2279 | 2279 | UCACUUUCUGAGUACCCGC | 5177 | GCGGGUACUCAGAAAGUGA |
| siRNA 2280 | 2280 | CACUUUCUGAGUACCCGCC | 5178 | GGCGGGUACUCAGAAAGUG |
| siRNA 2281 | 2281 | ACUUUCUGAGUACCCGCCG | 5179 | CGGCGGGUACUCAGAAAGU |
| siRNA 2282 | 2282 | CUUUCUGAGUACCCGCCGC | 5180 | GCGGCGGGUACUCAGAAAG |
| siRNA 2283 | 2283 | UUUCUGAGUACCCGCCGCU | 5181 | AGCGGCGGGUACUCAGAAA |
| siRNA 2284 | 2284 | UUCUGAGUACCCGCCGCUU | 5182 | AAGCGGCGGGUACUCAGAA |
| siRNA 2285 | 2285 | UCUGAGUACCCGCCGCUUC | 5183 | GAAGCGGCGGGUACUCAGA |
| siRNA 2286 | 2286 | CUGAGUACCCGCCGCUUCA | 5184 | UGAAGCGGCGGGUACUCAG |
| siRNA 2287 | 2287 | UGAGUACCCGCCGCUUCAC | 5185 | GUGAAGCGGCGGGUACUCA |
| siRNA 2288 | 2288 | GAGUACCCGCCGCUUCACA | 5186 | UGUGAAGCGGCGGGUACUC |
| siRNA 2289 | 2289 | AGUACCCGCCGCUUCACAG | 5187 | CUGUGAAGCGGCGGGUACU |
| siRNA 2290 | 2290 | GUACCCGCCGCUUCACAGG | 5188 | CCUGUGAAGCGGCGGGUAC |
| siRNA 2291 | 2291 | UACCCGCCGCUUCACAGGC | 5189 | GCCUGUGAAGCGGCGGGUA |
| siRNA 2292 | 2292 | ACCCGCCGCUUCACAGGCU | 5190 | AGCCUGUGAAGCGGCGGGU |
| siRNA 2293 | 2293 | CCCGCCGCUUCACAGGCUG | 5191 | CAGCCUGUGAAGCGGCGGG |
| siRNA 2294 | 2294 | CCGCCGCUUCACAGGCUGA | 5192 | UCAGCCUGUGAAGCGGCGG |
| siRNA 2295 | 2295 | CGCCGCUUCACAGGCUGAG | 5193 | CUCAGCCUGUGAAGCGGCG |
| siRNA 2296 | 2296 | GCCGCUUCACAGGCUGAGU | 5194 | ACUCAGCCUGUGAAGCGGC |
| siRNA 2297 | 2297 | CCGCUUCACAGGCUGAGUC | 5195 | GACUCAGCCUGUGAAGCGG |
| siRNA 2298 | 2298 | CGCUUCACAGGCUGAGUCC | 5196 | GGACUCAGCCUGUGAAGCG |
| siRNA 2299 | 2299 | GCUUCACAGGCUGAGUCCA | 5197 | UGGACUCAGCCUGUGAAGC |
| siRNA 2300 | 2300 | CUUCACAGGCUGAGUCCAG | 5198 | CUGGACUCAGCCUGUGAAG |
| siRNA 2301 | 2301 | UUCACAGGCUGAGUCCAGG | 5199 | CCUGGACUCAGCCUGUGAA |
| siRNA 2302 | 2302 | UCACAGGCUGAGUCCAGGC | 5200 | GCCUGGACUCAGCCUGUGA |
| siRNA 2303 | 2303 | CACAGGCUGAGUCCAGGCC | 5201 | GGCCUGGACUCAGCCUGUG |
| siRNA 2304 | 2304 | ACAGGCUGAGUCCAGGCCU | 5202 | AGGCCUGGACUCAGCCUGU |
| siRNA 2305 | 2305 | CAGGCUGAGUCCAGGCCUG | 5203 | CAGGCCUGGACUCAGCCUG |
| siRNA 2306 | 2306 | AGGCUGAGUCCAGGCCUGU | 5204 | ACAGGCCUGGACUCAGCCU |
| siRNA 2307 | 2307 | GGCUGAGUCCAGGCCUGUG | 5205 | CACAGGCCUGGACUCAGCC |
| siRNA 2308 | 2308 | GCUGAGUCCAGGCCUGUGU | 5206 | ACACAGGCCUGGACUCAGC |
| siRNA 2309 | 2309 | CUGAGUCCAGGCCUGUGUG | 5207 | CACACAGGCCUGGACUCAG |
| siRNA 2310 | 2310 | UGAGUCCAGGCCUGUGUGC | 5208 | GCACACAGGCCUGGACUCA |
| siRNA 2311 | 2311 | GAGUCCAGGCCUGUGUGCU | 5209 | AGCACACAGGCCUGGACUC |
| siRNA 2312 | 2312 | AGUCCAGGCCUGUGUGCUU | 5210 | AAGCACACAGGCCUGGACU |
| siRNA 2313 | 2313 | GUCCAGGCCUGUGUGCUUU | 5211 | AAAGCACACAGGCCUGGAC |
| siRNA 2314 | 2314 | UCCAGGCCUGUGUGCUUUG | 5212 | CAAAGCACACAGGCCUGGA |
| siRNA 2315 | 2315 | CCAGGCCUGUGUGCUUUGU | 5213 | ACAAAGCACACAGGCCUGG |
| siRNA 2316 | 2316 | CAGGCCUGUGUGCUUUGUA | 5214 | UACAAAGCACACAGGCCUG |
| siRNA 2317 | 2317 | AGGCCUGUGUGCUUUGUAG | 5215 | CUACAAAGCACACAGGCCU |
| siRNA 2318 | 2318 | GGCCUGUGUGCUUUGUAGA | 5216 | UCUACAAAGCACACAGGCC |
| siRNA 2319 | 2319 | GCCUGUGUGCUUUGUAGAG | 5217 | CUCUACAAAGCACACAGGC |
| siRNA 2320 | 2320 | CCUGUGUGCUUUGUAGAGC | 5218 | GCUCUACAAAGCACACAGG |
| siRNA 2321 | 2321 | CUGUGUGCUUUGUAGAGCC | 5219 | GGCUCUACAAAGCACACAG |
| siRNA 2322 | 2322 | UGUGUGCUUUGUAGAGCCA | 5220 | UGGCUCUACAAAGCACACA |
| siRNA 2323 | 2323 | GUGUGCUUUGUAGAGCCAG | 5221 | CUGGCUCUACAAAGCACAC |
| siRNA 2324 | 2324 | UGUGCUUUGUAGAGCCAGC | 5222 | GCUGGCUCUACAAAGCACA |
| siRNA 2325 | 2325 | GUGCUUUGUAGAGCCAGCU | 5223 | AGCUGGCUCUACAAAGCAC |
| siRNA 2326 | 2326 | UGCUUUGUAGAGCCAGCUG | 5224 | CAGCUGGCUCUACAAAGCA |
| siRNA 2327 | 2327 | GCUUUGUAGAGCCAGCUGC | 5225 | GCAGCUGGCUCUACAAAGC |
| siRNA 2328 | 2328 | CUUUGUAGAGCCAGCUGCU | 5226 | AGCAGCUGGCUCUACAAAG |
| siRNA 2329 | 2329 | UUUGUAGAGCCAGCUGCUU | 5227 | AAGCAGCUGGCUCUACAAA |
| siRNA 2330 | 2330 | UUGUAGAGCCAGCUGCUUG | 5228 | CAAGCAGCUGGCUCUACAA |
| siRNA 2331 | 2331 | UGUAGAGCCAGCUGCUUGC | 5229 | GCAAGCAGCUGGCUCUACA |
| siRNA 2332 | 2332 | GUAGAGCCAGCUGCUUGCU | 5230 | AGCAAGCAGCUGGCUCUAC |
| siRNA 2333 | 2333 | UAGAGCCAGCUGCUUGCUC | 5231 | GAGCAAGCAGCUGGCUCUA |
| siRNA 2334 | 2334 | AGAGCCAGCUGCUUGCUCA | 5232 | UGAGCAAGCAGCUGGCUCU |
| siRNA 2335 | 2335 | GAGCCAGCUGCUUGCUCAC | 5233 | GUGAGCAAGCAGCUGGCUC |
| siRNA 2336 | 2336 | AGCCAGCUGCUUGCUCACA | 5234 | UGUGAGCAAGCAGCUGGCU |
| siRNA 2337 | 2337 | GCCAGCUGCUUGCUCACAG | 5235 | CUGUGAGCAAGCAGCUGGC |
| siRNA 2338 | 2338 | CCAGCUGCUUGCUCACAGC | 5236 | GCUGUGAGCAAGCAGCUGG |
| siRNA 2339 | 2339 | CAGCUGCUUGCUCACAGCC | 5237 | GGCUGUGAGCAAGCAGCUG |
| siRNA 2340 | 2340 | AGCUGCUUGCUCACAGCCA | 5238 | UGGCUGUGAGCAAGCAGCU |
| siRNA 2341 | 2341 | GCUGCUUGCUCACAGCCAC | 5239 | GUGGCUGUGAGCAAGCAGC |
| siRNA 2342 | 2342 | CUGCUUGCUCACAGCCACA | 5240 | UGUGGCUGUGAGCAAGCAG |
| siRNA 2343 | 2343 | UGCUUGCUCACAGCCACAU | 5241 | AUGUGGCUGUGAGCAAGCA |
| siRNA 2344 | 2344 | GCUUGCUCACAGCCACAUU | 5242 | AAUGUGGCUGUGAGCAAGC |
| siRNA 2345 | 2345 | CUUGCUCACAGCCACAUUU | 5243 | AAAUGUGGCUGUGAGCAAG |
| siRNA 2346 | 2346 | UUGCUCACAGCCACAUUUC | 5244 | GAAAUGUGGCUGUGAGCAA |
| siRNA 2347 | 2347 | UGCUCACAGCCACAUUUCC | 5245 | GGAAAUGUGGCUGUGAGCA |
| siRNA 2348 | 2348 | GCUCACAGCCACAUUUCCA | 5246 | UGGAAAUGUGGCUGUGAGC |
| siRNA 2349 | 2349 | CUCACAGCCACAUUUCCAU | 5247 | AUGGAAAUGUGGCUGUGAG |
| siRNA 2350 | 2350 | UCACAGCCACAUUUCCAUU | 5248 | AAUGGAAAUGUGGCUGUGA |
| siRNA 2351 | 2351 | CACAGCCACAUUUCCAUUU | 5249 | AAAUGGAAAUGUGGCUGUG |
| siRNA 2352 | 2352 | ACAGCCACAUUUCCAUUUG | 5250 | CAAAUGGAAAUGUGGCUGU |
| siRNA 2353 | 2353 | CAGCCACAUUUCCAUUUGC | 5251 | GCAAAUGGAAAUGUGGCUG |
| siRNA 2354 | 2354 | AGCCACAUUUCCAUUUGCA | 5252 | UGCAAAUGGAAAUGUGGCU |
| siRNA 2355 | 2355 | GCCACAUUUCCAUUUGCAU | 5253 | AUGCAAAUGGAAAUGUGGC |
| siRNA 2356 | 2356 | CCACAUUUCCAUUUGCAUC | 5254 | GAUGCAAAUGGAAAUGUGG |
| siRNA 2357 | 2357 | CACAUUUCCAUUUGCAUCA | 5255 | UGAUGCAAAUGGAAAUGUG |
| siRNA 2358 | 2358 | ACAUUUCCAUUUGCAUCAU | 5256 | AUGAUGCAAAUGGAAAUGU |
| siRNA 2359 | 2359 | CAUUUCCAUUUGCAUCAUU | 5257 | AAUGAUGCAAAUGGAAAUG |
| siRNA 2360 | 2360 | AUUUCCAUUUGCAUCAUUA | 5258 | UAAUGAUGCAAAUGGAAAU |
| siRNA 2361 | 2361 | UUUCCAUUUGCAUCAUUAC | 5259 | GUAAUGAUGCAAAUGGAAA |
| siRNA 2362 | 2362 | UUCCAUUUGCAUCAUUACU | 5260 | AGUAAUGAUGCAAAUGGAA |
| siRNA 2363 | 2363 | UCCAUUUGCAUCAUUACUG | 5261 | CAGUAAUGAUGCAAAUGGA |
| siRNA 2364 | 2364 | CCAUUUGCAUCAUUACUGC | 5262 | GCAGUAAUGAUGCAAAUGG |
| siRNA 2365 | 2365 | CAUUUGCAUCAUUACUGCC | 5263 | GGCAGUAAUGAUGCAAAUG |
| siRNA 2366 | 2366 | AUUUGCAUCAUUACUGCCU | 5264 | AGGCAGUAAUGAUGCAAAU |
| siRNA 2367 | 2367 | UUUGCAUCAUUACUGCCUU | 5265 | AAGGCAGUAAUGAUGCAAA |
| siRNA 2368 | 2368 | UUGCAUCAUUACUGCCUUC | 5266 | GAAGGCAGUAAUGAUGCAA |
| siRNA 2369 | 2369 | UGCAUCAUUACUGCCUUCA | 5267 | UGAAGGCAGUAAUGAUGCA |
| siRNA 2370 | 2370 | GCAUCAUUACUGCCUUCAC | 5268 | GUGAAGGCAGUAAUGAUGC |
| siRNA 2371 | 2371 | CAUCAUUACUGCCUUCACC | 5269 | GGUGAAGGCAGUAAUGAUG |
| siRNA 2372 | 2372 | AUCAUUACUGCCUUCACCU | 5270 | AGGUGAAGGCAGUAAUGAU |
| siRNA 2373 | 2373 | UCAUUACUGCCUUCACCUG | 5271 | CAGGUGAAGGCAGUAAUGA |
| siRNA 2374 | 2374 | CAUUACUGCCUUCACCUGC | 5272 | GCAGGUGAAGGCAGUAAUG |
| siRNA 2375 | 2375 | AUUACUGCCUUCACCUGCA | 5273 | UGCAGGUGAAGGCAGUAAU |
| siRNA 2376 | 2376 | UUACUGCCUUCACCUGCAU | 5274 | AUGCAGGUGAAGGCAGUAA |
| siRNA 2377 | 2377 | UACUGCCUUCACCUGCAUA | 5275 | UAUGCAGGUGAAGGCAGUA |
| siRNA 2378 | 2378 | ACUGCCUUCACCUGCAUAG | 5276 | CUAUGCAGGUGAAGGCAGU |
| siRNA 2379 | 2379 | CUGCCUUCACCUGCAUAGU | 5277 | ACUAUGCAGGUGAAGGCAG |
| siRNA 2380 | 2380 | UGCCUUCACCUGCAUAGUC | 5278 | GACUAUGCAGGUGAAGGCA |
| siRNA 2381 | 2381 | GCCUUCACCUGCAUAGUCA | 5279 | UGACUAUGCAGGUGAAGGC |
| siRNA 2382 | 2382 | CCUUCACCUGCAUAGUCAC | 5280 | GUGACUAUGCAGGUGAAGG |
| siRNA 2383 | 2383 | CUUCACCUGCAUAGUCACU | 5281 | AGUGACUAUGCAGGUGAAG |
| siRNA 2384 | 2384 | UUCACCUGCAUAGUCACUC | 5282 | GAGUGACUAUGCAGGUGAA |
| siRNA 2385 | 2385 | UCACCUGCAUAGUCACUCU | 5283 | AGAGUGACUAUGCAGGUGA |
| siRNA 2386 | 2386 | CACCUGCAUAGUCACUCUU | 5284 | AAGAGUGACUAUGCAGGUG |
| siRNA 2387 | 2387 | ACCUGCAUAGUCACUCUUU | 5285 | AAAGAGUGACUAUGCAGGU |
| siRNA 2388 | 2388 | CCUGCAUAGUCACUCUUUU | 5286 | AAAAGAGUGACUAUGCAGG |
| siRNA 2389 | 2389 | CUGCAUAGUCACUCUUUUG | 5287 | CAAAAGAGUGACUAUGCAG |
| siRNA 2390 | 2390 | UGCAUAGUCACUCUUUUGA | 5288 | UCAAAAGAGUGACUAUGCA |
| siRNA 2391 | 2391 | GCAUAGUCACUCUUUUGAU | 5289 | AUCAAAAGAGUGACUAUGC |
| siRNA 2392 | 2392 | CAUAGUCACUCUUUUGAUG | 5290 | CAUCAAAAGAGUGACUAUG |
| siRNA 2393 | 2393 | AUAGUCACUCUUUUGAUGC | 5291 | GCAUCAAAAGAGUGACUAU |
| siRNA 2394 | 2394 | UAGUCACUCUUUUGAUGCU | 5292 | AGCAUCAAAAGAGUGACUA |
| siRNA 2395 | 2395 | AGUCACUCUUUUGAUGCUG | 5293 | CAGCAUCAAAAGAGUGACU |
| siRNA 2396 | 2396 | GUCACUCUUUUGAUGCUGG | 5294 | CCAGCAUCAAAAGAGUGAC |
| siRNA 2397 | 2397 | UCACUCUUUUGAUGCUGGG | 5295 | CCCAGCAUCAAAAGAGUGA |
| siRNA 2398 | 2398 | CACUCUUUUGAUGCUGGGG | 5296 | CCCCAGCAUCAAAAGAGUG |
| siRNA 2399 | 2399 | ACUCUUUUGAUGCUGGGGA | 5297 | UCCCCAGCAUCAAAAGAGU |
| siRNA 2400 | 2400 | CUCUUUUGAUGCUGGGGAA | 5298 | UUCCCCAGCAUCAAAAGAG |
| siRNA 2401 | 2401 | UCUUUUGAUGCUGGGGAAC | 5299 | GUUCCCCAGCAUCAAAAGA |
| siRNA 2402 | 2402 | CUUUUGAUGCUGGGGAACC | 5300 | GGUUCCCCAGCAUCAAAAG |
| siRNA 2403 | 2403 | UUUUGAUGCUGGGGAACCA | 5301 | UGGUUCCCCAGCAUCAAAA |
| siRNA 2404 | 2404 | UUUGAUGCUGGGGAACCAA | 5302 | UUGGUUCCCCAGCAUCAAA |
| siRNA 2405 | 2405 | UUGAUGCUGGGGAACCAAA | 5303 | UUUGGUUCCCCAGCAUCAA |
| siRNA 2406 | 2406 | UGAUGCUGGGGAACCAAAA | 5304 | UUUUGGUUCCCCAGCAUCA |
| siRNA 2407 | 2407 | GAUGCUGGGGAACCAAAAU | 5305 | AUUUUGGUUCCCCAGCAUC |
| siRNA 2408 | 2408 | AUGCUGGGGAACCAAAAUG | 5306 | CAUUUUGGUUCCCCAGCAU |
| siRNA 2409 | 2409 | UGCUGGGGAACCAAAAUGG | 5307 | CCAUUUUGGUUCCCCAGCA |
| siRNA 2410 | 2410 | GCUGGGGAACCAAAAUGGU | 5308 | ACCAUUUUGGUUCCCCAGC |
| siRNA 2411 | 2411 | CUGGGGAACCAAAAUGGUG | 5309 | CACCAUUUUGGUUCCCCAG |
| siRNA 2412 | 2412 | UGGGGAACCAAAAUGGUGA | 5310 | UCACCAUUUUGGUUCCCCA |
| siRNA 2413 | 2413 | GGGGAACCAAAAUGGUGAU | 5311 | AUCACCAUUUUGGUUCCCC |
| siRNA 2414 | 2414 | GGGAACCAAAAUGGUGAUG | 5312 | CAUCACCAUUUUGGUUCCC |
| siRNA 2415 | 2415 | GGAACCAAAAUGGUGAUGA | 5313 | UCAUCACCAUUUUGGUUCC |
| siRNA 2416 | 2416 | GAACCAAAAUGGUGAUGAU | 5314 | AUCAUCACCAUUUUGGUUC |
| siRNA 2417 | 2417 | AACCAAAAUGGUGAUGAUA | 5315 | UAUCAUCACCAUUUUGGUU |
| siRNA 2418 | 2418 | ACCAAAAUGGUGAUGAUAU | 5316 | AUAUCAUCACCAUUUUGGU |
| siRNA 2419 | 2419 | CCAAAAUGGUGAUGAUAUA | 5317 | UAUAUCAUCACCAUUUUGG |
| siRNA 2420 | 2420 | CAAAAUGGUGAUGAUAUAU | 5318 | AUAUAUCAUCACCAUUUUG |
| siRNA 2421 | 2421 | AAAAUGGUGAUGAUAUAUA | 5319 | UAUAUAUCAUCACCAUUUU |
| siRNA 2422 | 2422 | AAAUGGUGAUGAUAUAUAG | 5320 | CUAUAUAUCAUCACCAUUU |
| siRNA 2423 | 2423 | AAUGGUGAUGAUAUAUAGA | 5321 | UCUAUAUAUCAUCACCAUU |
| siRNA 2424 | 2424 | AUGGUGAUGAUAUAUAGAC | 5322 | GUCUAUAUAUCAUCACCAU |
| siRNA 2425 | 2425 | UGGUGAUGAUAUAUAGACU | 5323 | AGUCUAUAUAUCAUCACCA |
| siRNA 2426 | 2426 | GGUGAUGAUAUAUAGACUU | 5324 | AAGUCUAUAUAUCAUCACC |
| siRNA 2427 | 2427 | GUGAUGAUAUAUAGACUUU | 5325 | AAAGUCUAUAUAUCAUCAC |
| siRNA 2428 | 2428 | UGAUGAUAUAUAGACUUUA | 5326 | UAAAGUCUAUAUAUCAUCA |
| siRNA 2429 | 2429 | GAUGAUAUAUAGACUUUAU | 5327 | AUAAAGUCUAUAUAUCAUC |
| siRNA 2430 | 2430 | AUGAUAUAUAGACUUUAUG | 5328 | CAUAAAGUCUAUAUAUCAU |
| siRNA 2431 | 2431 | UGAUAUAUAGACUUUAUGU | 5329 | ACAUAAAGUCUAUAUAUCA |
| siRNA 2432 | 2432 | GAUAUAUAGACUUUAUGUA | 5330 | UACAUAAAGUCUAUAUAUC |
| siRNA 2433 | 2433 | AUAUAUAGACUUUAUGUAU | 5331 | AUACAUAAAGUCUAUAUAU |
| siRNA 2434 | 2434 | UAUAUAGACUUUAUGUAUA | 5332 | UAUACAUAAAGUCUAUAUA |
| siRNA 2435 | 2435 | AUAUAGACUUUAUGUAUAG | 5333 | CUAUACAUAAAGUCUAUAU |
| siRNA 2436 | 2436 | UAUAGACUUUAUGUAUAGC | 5334 | GCUAUACAUAAAGUCUAUA |
| siRNA 2437 | 2437 | AUAGACUUUAUGUAUAGCC | 5335 | GGCUAUACAUAAAGUCUAU |
| siRNA 2438 | 2438 | UAGACUUUAUGUAUAGCCA | 5336 | UGGCUAUACAUAAAGUCUA |
| siRNA 2439 | 2439 | AGACUUUAUGUAUAGCCAC | 5337 | GUGGCUAUACAUAAAGUCU |
| siRNA 2440 | 2440 | GACUUUAUGUAUAGCCACA | 5338 | UGUGGCUAUACAUAAAGUC |
| siRNA 2441 | 2441 | ACUUUAUGUAUAGCCACAG | 5339 | CUGUGGCUAUACAUAAAGU |
| siRNA 2442 | 2442 | CUUUAUGUAUAGCCACAGU | 5340 | ACUGUGGCUAUACAUAAAG |
| siRNA 2443 | 2443 | UUUAUGUAUAGCCACAGUU | 5341 | AACUGUGGCUAUACAUAAA |
| siRNA 2444 | 2444 | UUAUGUAUAGCCACAGUUC | 5342 | GAACUGUGGCUAUACAUAA |
| siRNA 2445 | 2445 | UAUGUAUAGCCACAGUUCA | 5343 | UGAACUGUGGCUAUACAUA |
| siRNA 2446 | 2446 | AUGUAUAGCCACAGUUCAU | 5344 | AUGAACUGUGGCUAUACAU |
| siRNA 2447 | 2447 | UGUAUAGCCACAGUUCAUC | 5345 | GAUGAACUGUGGCUAUACA |
| siRNA 2448 | 2448 | GUAUAGCCACAGUUCAUCC | 5346 | GGAUGAACUGUGGCUAUAC |
| siRNA 2449 | 2449 | UAUAGCCACAGUUCAUCCC | 5347 | GGGAUGAACUGUGGCUAUA |
| siRNA 2450 | 2450 | AUAGCCACAGUUCAUCCCC | 5348 | GGGGAUGAACUGUGGCUAU |
| siRNA 2451 | 2451 | UAGCCACAGUUCAUCCCCA | 5349 | UGGGGAUGAACUGUGGCUA |
| siRNA 2452 | 2452 | AGCCACAGUUCAUCCCCAA | 5350 | UUGGGGAUGAACUGUGGCU |
| siRNA 2453 | 2453 | GCCACAGUUCAUCCCCAAC | 5351 | GUUGGGGAUGAACUGUGGC |
| siRNA 2454 | 2454 | CCACAGUUCAUCCCCAACC | 5352 | GGUUGGGGAUGAACUGUGG |
| siRNA 2455 | 2455 | CACAGUUCAUCCCCAACCC | 5353 | GGGUUGGGGAUGAACUGUG |
| siRNA 2456 | 2456 | ACAGUUCAUCCCCAACCCU | 5354 | AGGGUUGGGGAUGAACUGU |
| siRNA 2457 | 2457 | CAGUUCAUCCCCAACCCUA | 5355 | UAGGGUUGGGGAUGAACUG |
| siRNA 2458 | 2458 | AGUUCAUCCCCAACCCUAG | 5356 | CUAGGGUUGGGGAUGAACU |
| siRNA 2459 | 2459 | GUUCAUCCCCAACCCUAGU | 5357 | ACUAGGGUUGGGGAUGAAC |
| siRNA 2460 | 2460 | UUCAUCCCCAACCCUAGUC | 5358 | GACUAGGGUUGGGGAUGAA |
| siRNA 2461 | 2461 | UCAUCCCCAACCCUAGUCU | 5359 | AGACUAGGGUUGGGGAUGA |
| siRNA 2462 | 2462 | CAUCCCCAACCCUAGUCUU | 5360 | AAGACUAGGGUUGGGGAUG |
| siRNA 2463 | 2463 | AUCCCCAACCCUAGUCUUC | 5361 | GAAGACUAGGGUUGGGGAU |
| siRNA 2464 | 2464 | UCCCCAACCCUAGUCUUCG | 5362 | CGAAGACUAGGGUUGGGGA |
| siRNA 2465 | 2465 | CCCCAACCCUAGUCUUCGA | 5363 | UCGAAGACUAGGGUUGGGG |
| siRNA 2466 | 2466 | CCCAACCCUAGUCUUCGAA | 5364 | UUCGAAGACUAGGGUUGGG |
| siRNA 2467 | 2467 | CCAACCCUAGUCUUCGAAA | 5365 | UUUCGAAGACUAGGGUUGG |
| siRNA 2468 | 2468 | CAACCCUAGUCUUCGAAAU | 5366 | AUUUCGAAGACUAGGGUUG |
| siRNA 2469 | 2469 | AACCCUAGUCUUCGAAAUG | 5367 | CAUUUCGAAGACUAGGGUU |
| siRNA 2470 | 2470 | ACCCUAGUCUUCGAAAUGU | 5368 | ACAUUUCGAAGACUAGGGU |
| siRNA 2471 | 2471 | CCCUAGUCUUCGAAAUGUU | 5369 | AACAUUUCGAAGACUAGGG |
| siRNA 2472 | 2472 | CCUAGUCUUCGAAAUGUUA | 5370 | UAACAUUUCGAAGACUAGG |
| siRNA 2473 | 2473 | CUAGUCUUCGAAAUGUUAA | 5371 | UUAACAUUUCGAAGACUAG |
| siRNA 2474 | 2474 | UAGUCUUCGAAAUGUUAAU | 5372 | AUUAACAUUUCGAAGACUA |
| siRNA 2475 | 2475 | AGUCUUCGAAAUGUUAAUA | 5373 | UAUUAACAUUUCGAAGACU |
| siRNA 2476 | 2476 | GUCUUCGAAAUGUUAAUAU | 5374 | AUAUUAACAUUUCGAAGAC |
| siRNA 2477 | 2477 | UCUUCGAAAUGUUAAUAUU | 5375 | AAUAUUAACAUUUCGAAGA |
| siRNA 2478 | 2478 | CUUCGAAAUGUUAAUAUUU | 5376 | AAAUAUUAACAUUUCGAAG |
| siRNA 2479 | 2479 | UUCGAAAUGUUAAUAUUUG | 5377 | CAAAUAUUAACAUUUCGAA |
| siRNA 2480 | 2480 | UCGAAAUGUUAAUAUUUGA | 5378 | UCAAAUAUUAACAUUUCGA |
| siRNA 2481 | 2481 | CGAAAUGUUAAUAUUUGAU | 5379 | AUCAAAUAUUAACAUUUCG |
| siRNA 2482 | 2482 | GAAAUGUUAAUAUUUGAUA | 5380 | UAUCAAAUAUUAACAUUUC |
| siRNA 2483 | 2483 | AAAUGUUAAUAUUUGAUAA | 5381 | UUAUCAAAUAUUAACAUUU |
| siRNA 2484 | 2484 | AAUGUUAAUAUUUGAUAAA | 5382 | UUUAUCAAAUAUUAACAUU |
| SIRNA 2485 | 2485 | AUGUUAAUAUUUGAUAAAU | 5383 | AUUUAUCAAAUAUUAACAU |
| siRNA 2486 | 2486 | UGUUAAUAUUUGAUAAAUC | 5384 | GAUUUAUCAAAUAUUAACA |
| siRNA 2487 | 2487 | GUUAAUAUUUGAUAAAUCU | 5385 | AGAUUUAUCAAAUAUUAAC |
| siRNA 2488 | 2488 | UUAAUAUUUGAUAAAUCUA | 5386 | UAGAUUUAUCAAAUAUUAA |
| siRNA 2489 | 2489 | UAAUAUUUGAUAAAUCUAG | 5387 | CUAGAUUUAUCAAAUAUUA |
| siRNA 2490 | 2490 | AAUAUUUGAUAAAUCUAGA | 5388 | UCUAGAUUUAUCAAAUAUU |
| siRNA 2491 | 2491 | AUAUUUGAUAAAUCUAGAA | 5389 | UUCUAGAUUUAUCAAAUAU |
| siRNA 2492 | 2492 | UAUUUGAUAAAUCUAGAAA | 5390 | UUUCUAGAUUUAUCAAAUA |
| siRNA 2493 | 2493 | AUUUGAUAAAUCUAGAAAA | 5391 | UUUUCUAGAUUUAUCAAAU |
| siRNA 2494 | 2494 | UUUGAUAAAUCUAGAAAAU | 5392 | AUUUUCUAGAUUUAUCAAA |
| siRNA 2495 | 2495 | UUGAUAAAUCUAGAAAAUG | 5393 | CAUUUUCUAGAUUUAUCAA |
| siRNA 2496 | 2496 | UGAUAAAUCUAGAAAAUGC | 5394 | GCAUUUUCUAGAUUUAUCA |
| siRNA 2497 | 2497 | GAUAAAUCUAGAAAAUGCA | 5395 | UGCAUUUUCUAGAUUUAUC |
| SIRNA 2498 | 2498 | AUAAAUCUAGAAAAUGCAU | 5396 | AUGCAUUUUCUAGAUUUAU |
| siRNA 2499 | 2499 | UAAAUCUAGAAAAUGCAUU | 5397 | AAUGCAUUUUCUAGAUUUA |
| siRNA 2500 | 2500 | AAAUCUAGAAAAUGCAUUC | 5398 | GAAUGCAUUUUCUAGAUUU |
| siRNA 2501 | 2501 | AAUCUAGAAAAUGCAUUCA | 5399 | UGAAUGCAUUUUCUAGAUU |
| siRNA 2502 | 2502 | AUCUAGAAAAUGCAUUCAU | 5400 | AUGAAUGCAUUUUCUAGAU |
| siRNA 2503 | 2503 | UCUAGAAAAUGCAUUCAUA | 5401 | UAUGAAUGCAUUUUCUAGA |
| siRNA 2504 | 2504 | CUAGAAAAUGCAUUCAUAC | 5402 | GUAUGAAUGCAUUUUCUAG |
| siRNA 2505 | 2505 | UAGAAAAUGCAUUCAUACA | 5403 | UGUAUGAAUGCAUUUUCUA |
| siRNA 2506 | 2506 | AGAAAAUGCAUUCAUACAA | 5404 | UUGUAUGAAUGCAUUUUCU |
| siRNA 2507 | 2507 | GAAAAUGCAUUCAUACAAU | 5405 | AUUGUAUGAAUGCAUUUUC |
| siRNA 2508 | 2508 | AAAAUGCAUUCAUACAAUU | 5406 | AAUUGUAUGAAUGCAUUUU |
| siRNA 2509 | 2509 | AAAUGCAUUCAUACAAUUA | 5407 | UAAUUGUAUGAAUGCAUUU |
| siRNA 2510 | 2510 | AAUGCAUUCAUACAAUUAC | 5408 | GUAAUUGUAUGAAUGCAUU |
| siRNA 2511 | 2511 | AUGCAUUCAUACAAUUACA | 5409 | UGUAAUUGUAUGAAUGCAU |
| siRNA 2512 | 2512 | UGCAUUCAUACAAUUACAG | 5410 | CUGUAAUUGUAUGAAUGCA |
| siRNA 2513 | 2513 | GCAUUCAUACAAUUACAGA | 5411 | UCUGUAAUUGUAUGAAUGC |
| siRNA 2514 | 2514 | CAUUCAUACAAUUACAGAA | 5412 | UUCUGUAAUUGUAUGAAUG |
| siRNA 2515 | 2515 | AUUCAUACAAUUACAGAAU | 5413 | AUUCUGUAAUUGUAUGAAU |
| siRNA 2516 | 2516 | UUCAUACAAUUACAGAAUU | 5414 | AAUUCUGUAAUUGUAUGAA |
| siRNA 2517 | 2517 | UCAUACAAUUACAGAAUUC | 5415 | GAAUUCUGUAAUUGUAUGA |
| siRNA 2518 | 2518 | CAUACAAUUACAGAAUUCA | 5416 | UGAAUUCUGUAAUUGUAUG |
| siRNA 2519 | 2519 | AUACAAUUACAGAAUUCAA | 5417 | UUGAAUUCUGUAAUUGUAU |
| siRNA 2520 | 2520 | UACAAUUACAGAAUUCAAA | 5418 | UUUGAAUUCUGUAAUUGUA |
| siRNA 2521 | 2521 | ACAAUUACAGAAUUCAAAU | 5419 | AUUUGAAUUCUGUAAUUGU |
| siRNA 2522 | 2522 | CAAUUACAGAAUUCAAAUA | 5420 | UAUUUGAAUUCUGUAAUUG |
| siRNA 2523 | 2523 | AAUUACAGAAUUCAAAUAU | 5421 | AUAUUUGAAUUCUGUAAUU |
| siRNA 2524 | 2524 | AUUACAGAAUUCAAAUAUU | 5422 | AAUAUUUGAAUUCUGUAAU |
| siRNA 2525 | 2525 | UUACAGAAUUCAAAUAUUG | 5423 | CAAUAUUUGAAUUCUGUAA |
| siRNA 2526 | 2526 | UACAGAAUUCAAAUAUUGC | 5424 | GCAAUAUUUGAAUUCUGUA |
| siRNA 2527 | 2527 | ACAGAAUUCAAAUAUUGCA | 5425 | UGCAAUAUUUGAAUUCUGU |
| siRNA 2528 | 2528 | CAGAAUUCAAAUAUUGCAA | 5426 | UUGCAAUAUUUGAAUUCUG |
| siRNA 2529 | 2529 | AGAAUUCAAAUAUUGCAAA | 5427 | UUUGCAAUAUUUGAAUUCU |
| siRNA 2530 | 2530 | GAAUUCAAAUAUUGCAAAA | 5428 | UUUUGCAAUAUUUGAAUUC |
| siRNA 2531 | 2531 | AAUUCAAAUAUUGCAAAAG | 5429 | CUUUUGCAAUAUUUGAAUU |
| siRNA 2532 | 2532 | AUUCAAAUAUUGCAAAAGG | 5430 | CCUUUUGCAAUAUUUGAAU |
| siRNA 2533 | 2533 | UUCAAAUAUUGCAAAAGGA | 5431 | UCCUUUUGCAAUAUUUGAA |
| siRNA 2534 | 2534 | UCAAAUAUUGCAAAAGGAU | 5432 | AUCCUUUUGCAAUAUUUGA |
| siRNA 2535 | 2535 | CAAAUAUUGCAAAAGGAUG | 5433 | CAUCCUUUUGCAAUAUUUG |
| siRNA 2536 | 2536 | AAAUAUUGCAAAAGGAUGU | 5434 | ACAUCCUUUUGCAAUAUUU |
| siRNA 2537 | 2537 | AAUAUUGCAAAAGGAUGUG | 5435 | CACAUCCUUUUGCAAUAUU |
| siRNA 2538 | 2538 | AUAUUGCAAAAGGAUGUGU | 5436 | ACACAUCCUUUUGCAAUAU |
| siRNA 2539 | 2539 | UAUUGCAAAAGGAUGUGUG | 5437 | CACACAUCCUUUUGCAAUA |
| siRNA 2540 | 2540 | AUUGCAAAAGGAUGUGUGU | 5438 | ACACACAUCCUUUUGCAAU |
| siRNA 2541 | 2541 | UUGCAAAAGGAUGUGUGUC | 5439 | GACACACAUCCUUUUGCAA |
| siRNA 2542 | 2542 | UGCAAAAGGAUGUGUGUCU | 5440 | AGACACACAUCCUUUUGCA |
| siRNA 2543 | 2543 | GCAAAAGGAUGUGUGUCUU | 5441 | AAGACACACAUCCUUUUGC |
| siRNA 2544 | 2544 | CAAAAGGAUGUGUGUCUUU | 5442 | AAAGACACACAUCCUUUUG |
| siRNA 2545 | 2545 | AAAAGGAUGUGUGUCUUUC | 5443 | GAAAGACACACAUCCUUUU |
| siRNA 2546 | 2546 | AAAGGAUGUGUGUCUUUCU | 5444 | AGAAAGACACACAUCCUUU |
| siRNA 2547 | 2547 | AAGGAUGUGUGUCUUUCUC | 5445 | GAGAAAGACACACAUCCUU |
| siRNA 2548 | 2548 | AGGAUGUGUGUCUUUCUCC | 5446 | GGAGAAAGACACACAUCCU |
| siRNA 2549 | 2549 | GGAUGUGUGUCUUUCUCCC | 5447 | GGGAGAAAGACACACAUCC |
| siRNA 2550 | 2550 | GAUGUGUGUCUUUCUCCCC | 5448 | GGGGAGAAAGACACACAUC |
| siRNA 2551 | 2551 | AUGUGUGUCUUUCUCCCCG | 5449 | CGGGGAGAAAGACACACAU |
| siRNA 2552 | 2552 | UGUGUGUCUUUCUCCCCGA | 5450 | UCGGGGAGAAAGACACACA |
| siRNA 2553 | 2553 | GUGUGUCUUUCUCCCCGAG | 5451 | CUCGGGGAGAAAGACACAC |
| siRNA 2554 | 2554 | UGUGUCUUUCUCCCCGAGC | 5452 | GCUCGGGGAGAAAGACACA |
| siRNA 2555 | 2555 | GUGUCUUUCUCCCCGAGCU | 5453 | AGCUCGGGGAGAAAGACAC |
| siRNA 2556 | 2556 | UGUCUUUCUCCCCGAGCUC | 5454 | GAGCUCGGGGAGAAAGACA |
| siRNA 2557 | 2557 | GUCUUUCUCCCCGAGCUCC | 5455 | GGAGCUCGGGGAGAAAGAC |
| siRNA 2558 | 2558 | UCUUUCUCCCCGAGCUCCC | 5456 | GGGAGCUCGGGGAGAAAGA |
| siRNA 2559 | 2559 | CUUUCUCCCCGAGCUCCCC | 5457 | GGGGAGCUCGGGGAGAAAG |
| siRNA 2560 | 2560 | UUUCUCCCCGAGCUCCCCU | 5458 | AGGGGAGCUCGGGGAGAAA |
| siRNA 2561 | 2561 | UUCUCCCCGAGCUCCCCUG | 5459 | CAGGGGAGCUCGGGGAGAA |
| siRNA 2562 | 2562 | UCUCCCCGAGCUCCCCUGU | 5460 | ACAGGGGAGCUCGGGGAGA |
| siRNA 2563 | 2563 | CUCCCCGAGCUCCCCUGUU | 5461 | AACAGGGGAGCUCGGGGAG |
| siRNA 2564 | 2564 | UCCCCGAGCUCCCCUGUUC | 5462 | GAACAGGGGAGCUCGGGGA |
| siRNA 2565 | 2565 | CCCCGAGCUCCCCUGUUCC | 5463 | GGAACAGGGGAGCUCGGGG |
| siRNA 2566 | 2566 | CCCGAGCUCCCCUGUUCCC | 5464 | GGGAACAGGGGAGCUCGGG |
| siRNA 2567 | 2567 | CCGAGCUCCCCUGUUCCCC | 5465 | GGGGAACAGGGGAGCUCGG |
| siRNA 2568 | 2568 | CGAGCUCCCCUGUUCCCCU | 5466 | AGGGGAACAGGGGAGCUCG |
| siRNA 2569 | 2569 | GAGCUCCCCUGUUCCCCUU | 5467 | AAGGGGAACAGGGGAGCUC |
| siRNA 2570 | 2570 | AGCUCCCCUGUUCCCCUUC | 5468 | GAAGGGGAACAGGGGAGCU |
| siRNA 2571 | 2571 | GCUCCCCUGUUCCCCUUCA | 5469 | UGAAGGGGAACAGGGGAGC |
| siRNA 2572 | 2572 | CUCCCCUGUUCCCCUUCAU | 5470 | AUGAAGGGGAACAGGGGAG |
| siRNA 2573 | 2573 | UCCCCUGUUCCCCUUCAUU | 5471 | AAUGAAGGGGAACAGGGGA |
| siRNA 2574 | 2574 | CCCCUGUUCCCCUUCAUUG | 5472 | CAAUGAAGGGGAACAGGGG |
| siRNA 2575 | 2575 | CCCUGUUCCCCUUCAUUGA | 5473 | UCAAUGAAGGGGAACAGGG |
| siRNA 2576 | 2576 | CCUGUUCCCCUUCAUUGAA | 5474 | UUCAAUGAAGGGGAACAGG |
| siRNA 2577 | 2577 | CUGUUCCCCUUCAUUGAAA | 5475 | UUUCAAUGAAGGGGAACAG |
| siRNA 2578 | 2578 | UGUUCCCCUUCAUUGAAAA | 5476 | UUUUCAAUGAAGGGGAACA |
| siRNA 2579 | 2579 | GUUCCCCUUCAUUGAAAAC | 5477 | GUUUUCAAUGAAGGGGAAC |
| siRNA 2580 | 2580 | UUCCCCUUCAUUGAAAACC | 5478 | GGUUUUCAAUGAAGGGGAA |
| siRNA 2581 | 2581 | UCCCCUUCAUUGAAAACCA | 5479 | UGGUUUUCAAUGAAGGGGA |
| siRNA 2582 | 2582 | CCCCUUCAUUGAAAACCAC | 5480 | GUGGUUUUCAAUGAAGGGG |
| SIRNA 2583 | 2583 | CCCUUCAUUGAAAACCACC | 5481 | GGUGGUUUUCAAUGAAGGG |
| siRNA 2584 | 2584 | CCUUCAUUGAAAACCACCA | 5482 | UGGUGGUUUUCAAUGAAGG |
| siRNA 2585 | 2585 | CUUCAUUGAAAACCACCAC | 5483 | GUGGUGGUUUUCAAUGAAG |
| siRNA 2586 | 2586 | UUCAUUGAAAACCACCACG | 5484 | CGUGGUGGUUUUCAAUGAA |
| siRNA 2587 | 2587 | UCAUUGAAAACCACCACGG | 5485 | CCGUGGUGGUUUUCAAUGA |
| siRNA 2588 | 2588 | CAUUGAAAACCACCACGGU | 5486 | ACCGUGGUGGUUUUCAAUG |
| siRNA 2589 | 2589 | AUUGAAAACCACCACGGUG | 5487 | CACCGUGGUGGUUUUCAAU |
| siRNA 2590 | 2590 | UUGAAAACCACCACGGUGC | 5488 | GCACCGUGGUGGUUUUCAA |
| siRNA 2591 | 2591 | UGAAAACCACCACGGUGCC | 5489 | GGCACCGUGGUGGUUUUCA |
| siRNA 2592 | 2592 | GAAAACCACCACGGUGCCA | 5490 | UGGCACCGUGGUGGUUUUC |
| siRNA 2593 | 2593 | AAAACCACCACGGUGCCAU | 5491 | AUGGCACCGUGGUGGUUUU |
| siRNA 2594 | 2594 | AAACCACCACGGUGCCAUC | 5492 | GAUGGCACCGUGGUGGUUU |
| siRNA 2595 | 2595 | AACCACCACGGUGCCAUCU | 5493 | AGAUGGCACCGUGGUGGUU |
| siRNA 2596 | 2596 | ACCACCACGGUGCCAUCUC | 5494 | GAGAUGGCACCGUGGUGGU |
| siRNA 2597 | 2597 | CCACCACGGUGCCAUCUCU | 5495 | AGAGAUGGCACCGUGGUGG |
| siRNA 2598 | 2598 | CACCACGGUGCCAUCUCUU | 5496 | AAGAGAUGGCACCGUGGUG |
| siRNA 2599 | 2599 | ACCACGGUGCCAUCUCUUG | 5497 | CAAGAGAUGGCACCGUGGU |
| siRNA 2600 | 2600 | CCACGGUGCCAUCUCUUGU | 5498 | ACAAGAGAUGGCACCGUGG |
| siRNA 2601 | 2601 | CACGGUGCCAUCUCUUGUG | 5499 | CACAAGAGAUGGCACCGUG |
| siRNA 2602 | 2602 | ACGGUGCCAUCUCUUGUGU | 5500 | ACACAAGAGAUGGCACCGU |
| siRNA 2603 | 2603 | CGGUGCCAUCUCUUGUGUA | 5501 | UACACAAGAGAUGGCACCG |
| siRNA 2604 | 2604 | GGUGCCAUCUCUUGUGUAU | 5502 | AUACACAAGAGAUGGCACC |
| siRNA 2605 | 2605 | GUGCCAUCUCUUGUGUAUG | 5503 | CAUACACAAGAGAUGGCAC |
| siRNA 2606 | 2606 | UGCCAUCUCUUGUGUAUGC | 5504 | GCAUACACAAGAGAUGGCA |
| siRNA 2607 | 2607 | GCCAUCUCUUGUGUAUGCA | 5505 | UGCAUACACAAGAGAUGGC |
| siRNA 2608 | 2608 | CCAUCUCUUGUGUAUGCAG | 5506 | CUGCAUACACAAGAGAUGG |
| siRNA 2609 | 2609 | CAUCUCUUGUGUAUGCAGG | 5507 | CCUGCAUACACAAGAGAUG |
| siRNA 2610 | 2610 | AUCUCUUGUGUAUGCAGGG | 5508 | CCCUGCAUACACAAGAGAU |
| siRNA 2611 | 2611 | UCUCUUGUGUAUGCAGGGC | 5509 | GCCCUGCAUACACAAGAGA |
| siRNA 2612 | 2612 | CUCUUGUGUAUGCAGGGCU | 5510 | AGCCCUGCAUACACAAGAG |
| siRNA 2613 | 2613 | UCUUGUGUAUGCAGGGCUA | 5511 | UAGCCCUGCAUACACAAGA |
| siRNA 2614 | 2614 | CUUGUGUAUGCAGGGCUAU | 5512 | AUAGCCCUGCAUACACAAG |
| siRNA 2615 | 2615 | UUGUGUAUGCAGGGCUAUG | 5513 | CAUAGCCCUGCAUACACAA |
| siRNA 2616 | 2616 | UGUGUAUGCAGGGCUAUGC | 5514 | GCAUAGCCCUGCAUACACA |
| siRNA 2617 | 2617 | GUGUAUGCAGGGCUAUGCA | 5515 | UGCAUAGCCCUGCAUACAC |
| siRNA 2618 | 2618 | UGUAUGCAGGGCUAUGCAC | 5516 | GUGCAUAGCCCUGCAUACA |
| siRNA 2619 | 2619 | GUAUGCAGGGCUAUGCACC | 5517 | GGUGCAUAGCCCUGCAUAC |
| siRNA 2620 | 2620 | UAUGCAGGGCUAUGCACCU | 5518 | AGGUGCAUAGCCCUGCAUA |
| siRNA 2621 | 2621 | AUGCAGGGCUAUGCACCUG | 5519 | CAGGUGCAUAGCCCUGCAU |
| siRNA 2622 | 2622 | UGCAGGGCUAUGCACCUGC | 5520 | GCAGGUGCAUAGCCCUGCA |
| siRNA 2623 | 2623 | GCAGGGCUAUGCACCUGCA | 5521 | UGCAGGUGCAUAGCCCUGC |
| siRNA 2624 | 2624 | CAGGGCUAUGCACCUGCAG | 5522 | CUGCAGGUGCAUAGCCCUG |
| siRNA 2625 | 2625 | AGGGCUAUGCACCUGCAGG | 5523 | CCUGCAGGUGCAUAGCCCU |
| siRNA 2626 | 2626 | GGGCUAUGCACCUGCAGGC | 5524 | GCCUGCAGGUGCAUAGCCC |
| siRNA 2627 | 2627 | GGCUAUGCACCUGCAGGCA | 5525 | UGCCUGCAGGUGCAUAGCC |
| siRNA 2628 | 2628 | GCUAUGCACCUGCAGGCAC | 5526 | GUGCCUGCAGGUGCAUAGC |
| siRNA 2629 | 2629 | CUAUGCACCUGCAGGCACG | 5527 | CGUGCCUGCAGGUGCAUAG |
| siRNA 2630 | 2630 | UAUGCACCUGCAGGCACGU | 5528 | ACGUGCCUGCAGGUGCAUA |
| siRNA 2631 | 2631 | AUGCACCUGCAGGCACGUG | 5529 | CACGUGCCUGCAGGUGCAU |
| siRNA 2632 | 2632 | UGCACCUGCAGGCACGUGU | 5530 | ACACGUGCCUGCAGGUGCA |
| siRNA 2633 | 2633 | GCACCUGCAGGCACGUGUG | 5531 | CACACGUGCCUGCAGGUGC |
| siRNA 2634 | 2634 | CACCUGCAGGCACGUGUGU | 5532 | ACACACGUGCCUGCAGGUG |
| siRNA 2635 | 2635 | ACCUGCAGGCACGUGUGUA | 5533 | UACACACGUGCCUGCAGGU |
| siRNA 2636 | 2636 | CCUGCAGGCACGUGUGUAU | 5534 | AUACACACGUGCCUGCAGG |
| siRNA 2637 | 2637 | CUGCAGGCACGUGUGUAUG | 5535 | CAUACACACGUGCCUGCAG |
| siRNA 2638 | 2638 | UGCAGGCACGUGUGUAUGC | 5536 | GCAUACACACGUGCCUGCA |
| siRNA 2639 | 2639 | GCAGGCACGUGUGUAUGCA | 5537 | UGCAUACACACGUGCCUGC |
| siRNA 2640 | 2640 | CAGGCACGUGUGUAUGCAC | 5538 | GUGCAUACACACGUGCCUG |
| siRNA 2641 | 2641 | AGGCACGUGUGUAUGCACU | 5539 | AGUGCAUACACACGUGCCU |
| siRNA 2642 | 2642 | GGCACGUGUGUAUGCACUC | 5540 | GAGUGCAUACACACGUGCC |
| siRNA 2643 | 2643 | GCACGUGUGUAUGCACUCC | 5541 | GGAGUGCAUACACACGUGC |
| siRNA 2644 | 2644 | CACGUGUGUAUGCACUCCC | 5542 | GGGAGUGCAUACACACGUG |
| siRNA 2645 | 2645 | ACGUGUGUAUGCACUCCCC | 5543 | GGGGAGUGCAUACACACGU |
| siRNA 2646 | 2646 | CGUGUGUAUGCACUCCCCG | 5544 | CGGGGAGUGCAUACACACG |
| siRNA 2647 | 2647 | GUGUGUAUGCACUCCCCGC | 5545 | GCGGGGAGUGCAUACACAC |
| siRNA 2648 | 2648 | UGUGUAUGCACUCCCCGCU | 5546 | AGCGGGGAGUGCAUACACA |
| siRNA 2649 | 2649 | GUGUAUGCACUCCCCGCUU | 5547 | AAGCGGGGAGUGCAUACAC |
| siRNA 2650 | 2650 | UGUAUGCACUCCCCGCUUG | 5548 | CAAGCGGGGAGUGCAUACA |
| siRNA 2651 | 2651 | GUAUGCACUCCCCGCUUGU | 5549 | ACAAGCGGGGAGUGCAUAC |
| siRNA 2652 | 2652 | UAUGCACUCCCCGCUUGUG | 5550 | CACAAGCGGGGAGUGCAUA |
| siRNA 2653 | 2653 | AUGCACUCCCCGCUUGUGU | 5551 | ACACAAGCGGGGAGUGCAU |
| siRNA 2654 | 2654 | UGCACUCCCCGCUUGUGUU | 5552 | AACACAAGCGGGGAGUGCA |
| siRNA 2655 | 2655 | GCACUCCCCGCUUGUGUUU | 5553 | AAACACAAGCGGGGAGUGC |
| siRNA 2656 | 2656 | CACUCCCCGCUUGUGUUUA | 5554 | UAAACACAAGCGGGGAGUG |
| siRNA 2657 | 2657 | ACUCCCCGCUUGUGUUUAC | 5555 | GUAAACACAAGCGGGGAGU |
| siRNA 2658 | 2658 | CUCCCCGCUUGUGUUUACA | 5556 | UGUAAACACAAGCGGGGAG |
| siRNA 2659 | 2659 | UCCCCGCUUGUGUUUACAC | 5557 | GUGUAAACACAAGCGGGGA |
| siRNA 2660 | 2660 | CCCCGCUUGUGUUUACACA | 5558 | UGUGUAAACACAAGCGGGG |
| siRNA 2661 | 2661 | CCCGCUUGUGUUUACACAA | 5559 | UUGUGUAAACACAAGCGGG |
| siRNA 2662 | 2662 | CCGCUUGUGUUUACACAAG | 5560 | CUUGUGUAAACACAAGCGG |
| siRNA 2663 | 2663 | CGCUUGUGUUUACACAAGC | 5561 | GCUUGUGUAAACACAAGCG |
| siRNA 2664 | 2664 | GCUUGUGUUUACACAAGCU | 5562 | AGCUUGUGUAAACACAAGC |
| siRNA 2665 | 2665 | CUUGUGUUUACACAAGCUG | 5563 | CAGCUUGUGUAAACACAAG |
| siRNA 2666 | 2666 | UUGUGUUUACACAAGCUGU | 5564 | ACAGCUUGUGUAAACACAA |
| siRNA 2667 | 2667 | UGUGUUUACACAAGCUGUG | 5565 | CACAGCUUGUGUAAACACA |
| siRNA 2668 | 2668 | GUGUUUACACAAGCUGUGG | 5566 | CCACAGCUUGUGUAAACAC |
| siRNA 2669 | 2669 | UGUUUACACAAGCUGUGGG | 5567 | CCCACAGCUUGUGUAAACA |
| siRNA 2670 | 2670 | GUUUACACAAGCUGUGGGG | 5568 | CCCCACAGCUUGUGUAAAC |
| siRNA 2671 | 2671 | UUUACACAAGCUGUGGGGU | 5569 | ACCCCACAGCUUGUGUAAA |
| siRNA 2672 | 2672 | UUACACAAGCUGUGGGGUG | 5570 | CACCCCACAGCUUGUGUAA |
| siRNA 2673 | 2673 | UACACAAGCUGUGGGGUGU | 5571 | ACACCCCACAGCUUGUGUA |
| siRNA 2674 | 2674 | ACACAAGCUGUGGGGUGUU | 5572 | AACACCCCACAGCUUGUGU |
| siRNA 2675 | 2675 | CACAAGCUGUGGGGUGUUA | 5573 | UAACACCCCACAGCUUGUG |
| siRNA 2676 | 2676 | ACAAGCUGUGGGGUGUUAC | 5574 | GUAACACCCCACAGCUUGU |
| siRNA 2677 | 2677 | CAAGCUGUGGGGUGUUACG | 5575 | CGUAACACCCCACAGCUUG |
| siRNA 2678 | 2678 | AAGCUGUGGGGUGUUACGC | 5576 | GCGUAACACCCCACAGCUU |
| siRNA 2679 | 2679 | AGCUGUGGGGUGUUACGCA | 5577 | UGCGUAACACCCCACAGCU |
| siRNA 2680 | 2680 | GCUGUGGGGUGUUACGCAU | 5578 | AUGCGUAACACCCCACAGC |
| siRNA 2681 | 2681 | CUGUGGGGUGUUACGCAUG | 5579 | CAUGCGUAACACCCCACAG |
| siRNA 2682 | 2682 | UGUGGGGUGUUACGCAUGC | 5580 | GCAUGCGUAACACCCCACA |
| siRNA 2683 | 2683 | GUGGGGUGUUACGCAUGCC | 5581 | GGCAUGCGUAACACCCCAC |
| siRNA 2684 | 2684 | UGGGGUGUUACGCAUGCCU | 5582 | AGGCAUGCGUAACACCCCA |
| siRNA 2685 | 2685 | GGGGUGUUACGCAUGCCUG | 5583 | CAGGCAUGCGUAACACCCC |
| siRNA 2686 | 2686 | GGGUGUUACGCAUGCCUGC | 5584 | GCAGGCAUGCGUAACACCC |
| siRNA 2687 | 2687 | GGUGUUACGCAUGCCUGCU | 5585 | AGCAGGCAUGCGUAACACC |
| siRNA 2688 | 2688 | GUGUUACGCAUGCCUGCUU | 5586 | AAGCAGGCAUGCGUAACAC |
| siRNA 2689 | 2689 | UGUUACGCAUGCCUGCUUU | 5587 | AAAGCAGGCAUGCGUAACA |
| siRNA 2690 | 2690 | GUUACGCAUGCCUGCUUUU | 5588 | AAAAGCAGGCAUGCGUAAC |
| siRNA 2691 | 2691 | UUACGCAUGCCUGCUUUUU | 5589 | AAAAAGCAGGCAUGCGUAA |
| siRNA 2692 | 2692 | UACGCAUGCCUGCUUUUUU | 5590 | AAAAAAGCAGGCAUGCGUA |
| siRNA 2693 | 2693 | ACGCAUGCCUGCUUUUUUC | 5591 | GAAAAAAGCAGGCAUGCGU |
| siRNA 2694 | 2694 | CGCAUGCCUGCUUUUUUCA | 5592 | UGAAAAAAGCAGGCAUGCG |
| siRNA 2695 | 2695 | GCAUGCCUGCUUUUUUCAC | 5593 | GUGAAAAAAGCAGGCAUGC |
| siRNA 2696 | 2696 | CAUGCCUGCUUUUUUCACU | 5594 | AGUGAAAAAAGCAGGCAUG |
| siRNA 2697 | 2697 | AUGCCUGCUUUUUUCACUU | 5595 | AAGUGAAAAAAGCAGGCAU |
| siRNA 2698 | 2698 | UGCCUGCUUUUUUCACUUA | 5596 | UAAGUGAAAAAAGCAGGCA |
| siRNA 2699 | 2699 | GCCUGCUUUUUUCACUUAA | 5597 | UUAAGUGAAAAAAGCAGGC |
| siRNA 2700 | 2700 | CCUGCUUUUUUCACUUAAU | 5598 | AUUAAGUGAAAAAAGCAGG |
| siRNA 2701 | 2701 | CUGCUUUUUUCACUUAAUA | 5599 | UAUUAAGUGAAAAAAGCAG |
| siRNA 2702 | 2702 | UGCUUUUUUCACUUAAUAA | 5600 | UUAUUAAGUGAAAAAAGCA |
| siRNA 2703 | 2703 | GCUUUUUUCACUUAAUAAU | 5601 | AUUAUUAAGUGAAAAAAGC |
| siRNA 2704 | 2704 | CUUUUUUCACUUAAUAAUA | 5602 | UAUUAUUAAGUGAAAAAAG |
| siRNA 2705 | 2705 | UUUUUUCACUUAAUAAUAC | 5603 | GUAUUAUUAAGUGAAAAAA |
| siRNA 2706 | 2706 | UUUUUCACUUAAUAAUACA | 5604 | UGUAUUAUUAAGUGAAAAA |
| siRNA 2707 | 2707 | UUUUCACUUAAUAAUACAG | 5605 | CUGUAUUAUUAAGUGAAAA |
| siRNA 2708 | 2708 | UUUCACUUAAUAAUACAGC | 5606 | GCUGUAUUAUUAAGUGAAA |
| siRNA 2709 | 2709 | UUCACUUAAUAAUACAGCU | 5607 | AGCUGUAUUAUUAAGUGAA |
| siRNA 2710 | 2710 | UCACUUAAUAAUACAGCUU | 5608 | AAGCUGUAUUAUUAAGUGA |
| siRNA 2711 | 2711 | CACUUAAUAAUACAGCUUG | 5609 | CAAGCUGUAUUAUUAAGUG |
| siRNA 2712 | 2712 | ACUUAAUAAUACAGCUUGG | 5610 | CCAAGCUGUAUUAUUAAGU |
| siRNA 2713 | 2713 | CUUAAUAAUACAGCUUGGA | 5611 | UCCAAGCUGUAUUAUUAAG |
| siRNA 2714 | 2714 | UUAAUAAUACAGCUUGGAG | 5612 | CUCCAAGCUGUAUUAUUAA |
| siRNA 2715 | 2715 | UAAUAAUACAGCUUGGAGA | 5613 | UCUCCAAGCUGUAUUAUUA |
| siRNA 2716 | 2716 | AAUAAUACAGCUUGGAGAG | 5614 | CUCUCCAAGCUGUAUUAUU |
| siRNA 2717 | 2717 | AUAAUACAGCUUGGAGAGA | 5615 | UCUCUCCAAGCUGUAUUAU |
| siRNA 2718 | 2718 | UAAUACAGCUUGGAGAGAU | 5616 | AUCUCUCCAAGCUGUAUUA |
| siRNA 2719 | 2719 | AAUACAGCUUGGAGAGAUU | 5617 | AAUCUCUCCAAGCUGUAUU |
| siRNA 2720 | 2720 | AUACAGCUUGGAGAGAUUU | 5618 | AAAUCUCUCCAAGCUGUAU |
| siRNA 2721 | 2721 | UACAGCUUGGAGAGAUUUU | 5619 | AAAAUCUCUCCAAGCUGUA |
| siRNA 2722 | 2722 | ACAGCUUGGAGAGAUUUUU | 5620 | AAAAAUCUCUCCAAGCUGU |
| siRNA 2723 | 2723 | CAGCUUGGAGAGAUUUUUG | 5621 | CAAAAAUCUCUCCAAGCUG |
| siRNA 2724 | 2724 | AGCUUGGAGAGAUUUUUGU | 5622 | ACAAAAAUCUCUCCAAGCU |
| siRNA 2725 | 2725 | GCUUGGAGAGAUUUUUGUA | 5623 | UACAAAAAUCUCUCCAAGC |
| siRNA 2726 | 2726 | CUUGGAGAGAUUUUUGUAU | 5624 | AUACAAAAAUCUCUCCAAG |
| siRNA 2727 | 2727 | UUGGAGAGAUUUUUGUAUC | 5625 | GAUACAAAAAUCUCUCCAA |
| siRNA 2728 | 2728 | UGGAGAGAUUUUUGUAUCA | 5626 | UGAUACAAAAAUCUCUCCA |
| siRNA 2729 | 2729 | GGAGAGAUUUUUGUAUCAC | 5627 | GUGAUACAAAAAUCUCUCC |
| siRNA 2730 | 2730 | GAGAGAUUUUUGUAUCACA | 5628 | UGUGAUACAAAAAUCUCUC |
| siRNA 2731 | 2731 | AGAGAUUUUUGUAUCACAU | 5629 | AUGUGAUACAAAAAUCUCU |
| siRNA 2732 | 2732 | GAGAUUUUUGUAUCACAUU | 5630 | AAUGUGAUACAAAAAUCUC |
| siRNA 2733 | 2733 | AGAUUUUUGUAUCACAUUA | 5631 | UAAUGUGAUACAAAAAUCU |
| siRNA 2734 | 2734 | GAUUUUUGUAUCACAUUAU | 5632 | AUAAUGUGAUACAAAAAUC |
| siRNA 2735 | 2735 | AUUUUUGUAUCACAUUAUA | 5633 | UAUAAUGUGAUACAAAAAU |
| siRNA 2736 | 2736 | UUUUUGUAUCACAUUAUAA | 5634 | UUAUAAUGUGAUACAAAAA |
| siRNA 2737 | 2737 | UUUUGUAUCACAUUAUAAA | 5635 | UUUAUAAUGUGAUACAAAA |
| siRNA 2738 | 2738 | UUUGUAUCACAUUAUAAAU | 5636 | AUUUAUAAUGUGAUACAAA |
| siRNA 2739 | 2739 | UUGUAUCACAUUAUAAAUC | 5637 | GAUUUAUAAUGUGAUACAA |
| siRNA 2740 | 2740 | UGUAUCACAUUAUAAAUCC | 5638 | GGAUUUAUAAUGUGAUACA |
| siRNA 2741 | 2741 | GUAUCACAUUAUAAAUCCC | 5639 | GGGAUUUAUAAUGUGAUAC |
| siRNA 2742 | 2742 | UAUCACAUUAUAAAUCCCA | 5640 | UGGGAUUUAUAAUGUGAUA |
| siRNA 2743 | 2743 | AUCACAUUAUAAAUCCCAC | 5641 | GUGGGAUUUAUAAUGUGAU |
| siRNA 2744 | 2744 | UCACAUUAUAAAUCCCACU | 5642 | AGUGGGAUUUAUAAUGUGA |
| siRNA 2745 | 2745 | CACAUUAUAAAUCCCACUC | 5643 | GAGUGGGAUUUAUAAUGUG |
| siRNA 2746 | 2746 | ACAUUAUAAAUCCCACUCG | 5644 | CGAGUGGGAUUUAUAAUGU |
| siRNA 2747 | 2747 | CAUUAUAAAUCCCACUCGC | 5645 | GCGAGUGGGAUUUAUAAUG |
| siRNA 2748 | 2748 | AUUAUAAAUCCCACUCGCU | 5646 | AGCGAGUGGGAUUUAUAAU |
| siRNA 2749 | 2749 | UUAUAAAUCCCACUCGCUC | 5647 | GAGCGAGUGGGAUUUAUAA |
| siRNA 2750 | 2750 | UAUAAAUCCCACUCGCUCU | 5648 | AGAGCGAGUGGGAUUUAUA |
| siRNA 2751 | 2751 | AUAAAUCCCACUCGCUCUU | 5649 | AAGAGCGAGUGGGAUUUAU |
| siRNA 2752 | 2752 | UAAAUCCCACUCGCUCUUU | 5650 | AAAGAGCGAGUGGGAUUUA |
| siRNA 2753 | 2753 | AAAUCCCACUCGCUCUUUU | 5651 | AAAAGAGCGAGUGGGAUUU |
| siRNA 2754 | 2754 | AAUCCCACUCGCUCUUUUU | 5652 | AAAAAGAGCGAGUGGGAUU |
| siRNA 2755 | 2755 | AUCCCACUCGCUCUUUUUG | 5653 | CAAAAAGAGCGAGUGGGAU |
| siRNA 2756 | 2756 | UCCCACUCGCUCUUUUUGA | 5654 | UCAAAAAGAGCGAGUGGGA |
| siRNA 2757 | 2757 | CCCACUCGCUCUUUUUGAU | 5655 | AUCAAAAAGAGCGAGUGGG |
| siRNA 2758 | 2758 | CCACUCGCUCUUUUUGAUG | 5656 | CAUCAAAAAGAGCGAGUGG |
| siRNA 2759 | 2759 | CACUCGCUCUUUUUGAUGG | 5657 | CCAUCAAAAAGAGCGAGUG |
| siRNA 2760 | 2760 | ACUCGCUCUUUUUGAUGGC | 5658 | GCCAUCAAAAAGAGCGAGU |
| siRNA 2761 | 2761 | CUCGCUCUUUUUGAUGGCC | 5659 | GGCCAUCAAAAAGAGCGAG |
| siRNA 2762 | 2762 | UCGCUCUUUUUGAUGGCCA | 5660 | UGGCCAUCAAAAAGAGCGA |
| SIRNA 2763 | 2763 | CGCUCUUUUUGAUGGCCAC | 5661 | GUGGCCAUCAAAAAGAGCG |
| siRNA 2764 | 2764 | GCUCUUUUUGAUGGCCACA | 5662 | UGUGGCCAUCAAAAAGAGC |
| siRNA 2765 | 2765 | CUCUUUUUGAUGGCCACAU | 5663 | AUGUGGCCAUCAAAAAGAG |
| siRNA 2766 | 2766 | UCUUUUUGAUGGCCACAUA | 5664 | UAUGUGGCCAUCAAAAAGA |
| siRNA 2767 | 2767 | CUUUUUGAUGGCCACAUAA | 5665 | UUAUGUGGCCAUCAAAAAG |
| siRNA 2768 | 2768 | UUUUUGAUGGCCACAUAAU | 5666 | AUUAUGUGGCCAUCAAAAA |
| siRNA 2769 | 2769 | UUUUGAUGGCCACAUAAUA | 5667 | UAUUAUGUGGCCAUCAAAA |
| siRNA 2770 | 2770 | UUUGAUGGCCACAUAAUAA | 5668 | UUAUUAUGUGGCCAUCAAA |
| siRNA 2771 | 2771 | UUGAUGGCCACAUAAUAAC | 5669 | GUUAUUAUGUGGCCAUCAA |
| siRNA 2772 | 2772 | UGAUGGCCACAUAAUAACU | 5670 | AGUUAUUAUGUGGCCAUCA |
| siRNA 2773 | 2773 | GAUGGCCACAUAAUAACUA | 5671 | UAGUUAUUAUGUGGCCAUC |
| siRNA 2774 | 2774 | AUGGCCACAUAAUAACUAC | 5672 | GUAGUUAUUAUGUGGCCAU |
| siRNA 2775 | 2775 | UGGCCACAUAAUAACUACU | 5673 | AGUAGUUAUUAUGUGGCCA |
| siRNA 2776 | 2776 | GGCCACAUAAUAACUACUG | 5674 | CAGUAGUUAUUAUGUGGCC |
| siRNA 2777 | 2777 | GCCACAUAAUAACUACUGC | 5675 | GCAGUAGUUAUUAUGUGGC |
| siRNA 2778 | 2778 | CCACAUAAUAACUACUGCA | 5676 | UGCAGUAGUUAUUAUGUGG |
| siRNA 2779 | 2779 | CACAUAAUAACUACUGCAU | 5677 | AUGCAGUAGUUAUUAUGUG |
| siRNA 2780 | 2780 | ACAUAAUAACUACUGCAUA | 5678 | UAUGCAGUAGUUAUUAUGU |
| siRNA 2781 | 2781 | CAUAAUAACUACUGCAUAA | 5679 | UUAUGCAGUAGUUAUUAUG |
| siRNA 2782 | 2782 | AUAAUAACUACUGCAUAAU | 5680 | AUUAUGCAGUAGUUAUUAU |
| siRNA 2783 | 2783 | UAAUAACUACUGCAUAAUA | 5681 | UAUUAUGCAGUAGUUAUUA |
| siRNA 2784 | 2784 | AAUAACUACUGCAUAAUAU | 5682 | AUAUUAUGCAGUAGUUAUU |
| siRNA 2785 | 2785 | AUAACUACUGCAUAAUAUG | 5683 | CAUAUUAUGCAGUAGUUAU |
| siRNA 2786 | 2786 | UAACUACUGCAUAAUAUGG | 5684 | CCAUAUUAUGCAGUAGUUA |
| siRNA 2787 | 2787 | AACUACUGCAUAAUAUGGA | 5685 | UCCAUAUUAUGCAGUAGUU |
| siRNA 2788 | 2788 | ACUACUGCAUAAUAUGGAU | 5686 | AUCCAUAUUAUGCAGUAGU |
| siRNA 2789 | 2789 | CUACUGCAUAAUAUGGAUA | 5687 | UAUCCAUAUUAUGCAGUAG |
| siRNA 2790 | 2790 | UACUGCAUAAUAUGGAUAC | 5688 | GUAUCCAUAUUAUGCAGUA |
| siRNA 2791 | 2791 | ACUGCAUAAUAUGGAUACG | 5689 | CGUAUCCAUAUUAUGCAGU |
| siRNA 2792 | 2792 | CUGCAUAAUAUGGAUACGC | 5690 | GCGUAUCCAUAUUAUGCAG |
| siRNA 2793 | 2793 | UGCAUAAUAUGGAUACGCC | 5691 | GGCGUAUCCAUAUUAUGCA |
| siRNA 2794 | 2794 | GCAUAAUAUGGAUACGCCU | 5692 | AGGCGUAUCCAUAUUAUGC |
| siRNA 2795 | 2795 | CAUAAUAUGGAUACGCCUU | 5693 | AAGGCGUAUCCAUAUUAUG |
| siRNA 2796 | 2796 | AUAAUAUGGAUACGCCUUA | 5694 | UAAGGCGUAUCCAUAUUAU |
| siRNA 2797 | 2797 | UAAUAUGGAUACGCCUUAU | 5695 | AUAAGGCGUAUCCAUAUUA |
| siRNA 2798 | 2798 | AAUAUGGAUACGCCUUAUU | 5696 | AAUAAGGCGUAUCCAUAUU |
| siRNA 2799 | 2799 | AUAUGGAUACGCCUUAUUU | 5697 | AAAUAAGGCGUAUCCAUAU |
| siRNA 2800 | 2800 | UAUGGAUACGCCUUAUUUG | 5698 | CAAAUAAGGCGUAUCCAUA |
| siRNA 2801 | 2801 | AUGGAUACGCCUUAUUUGA | 5699 | UCAAAUAAGGCGUAUCCAU |
| siRNA 2802 | 2802 | UGGAUACGCCUUAUUUGAU | 5700 | AUCAAAUAAGGCGUAUCCA |
| siRNA 2803 | 2803 | GGAUACGCCUUAUUUGAUU | 5701 | AAUCAAAUAAGGCGUAUCC |
| siRNA 2804 | 2804 | GAUACGCCUUAUUUGAUUU | 5702 | AAAUCAAAUAAGGCGUAUC |
| siRNA 2805 | 2805 | AUACGCCUUAUUUGAUUUA | 5703 | UAAAUCAAAUAAGGCGUAU |
| siRNA 2806 | 2806 | UACGCCUUAUUUGAUUUAA | 5704 | UUAAAUCAAAUAAGGCGUA |
| siRNA 2807 | 2807 | ACGCCUUAUUUGAUUUAAC | 5705 | GUUAAAUCAAAUAAGGCGU |
| siRNA 2808 | 2808 | CGCCUUAUUUGAUUUAACU | 5706 | AGUUAAAUCAAAUAAGGCG |
| siRNA 2809 | 2809 | GCCUUAUUUGAUUUAACUA | 5707 | UAGUUAAAUCAAAUAAGGC |
| siRNA 2810 | 2810 | CCUUAUUUGAUUUAACUAG | 5708 | CUAGUUAAAUCAAAUAAGG |
| siRNA 2811 | 2811 | CUUAUUUGAUUUAACUAGU | 5709 | ACUAGUUAAAUCAAAUAAG |
| siRNA 2812 | 2812 | UUAUUUGAUUUAACUAGUU | 5710 | AACUAGUUAAAUCAAAUAA |
| siRNA 2813 | 2813 | UAUUUGAUUUAACUAGUUC | 5711 | GAACUAGUUAAAUCAAAUA |
| siRNA 2814 | 2814 | AUUUGAUUUAACUAGUUCC | 5712 | GGAACUAGUUAAAUCAAAU |
| siRNA 2815 | 2815 | UUUGAUUUAACUAGUUCCC | 5713 | GGGAACUAGUUAAAUCAAA |
| siRNA 2816 | 2816 | UUGAUUUAACUAGUUCCCU | 5714 | AGGGAACUAGUUAAAUCAA |
| siRNA 2817 | 2817 | UGAUUUAACUAGUUCCCUA | 5715 | UAGGGAACUAGUUAAAUCA |
| siRNA 2818 | 2818 | GAUUUAACUAGUUCCCUAA | 5716 | UUAGGGAACUAGUUAAAUC |
| siRNA 2819 | 2819 | AUUUAACUAGUUCCCUAAU | 5717 | AUUAGGGAACUAGUUAAAU |
| siRNA 2820 | 2820 | UUUAACUAGUUCCCUAAUG | 5718 | CAUUAGGGAACUAGUUAAA |
| siRNA 2821 | 2821 | UUAACUAGUUCCCUAAUGA | 5719 | UCAUUAGGGAACUAGUUAA |
| siRNA 2822 | 2822 | UAACUAGUUCCCUAAUGAU | 5720 | AUCAUUAGGGAACUAGUUA |
| siRNA 2823 | 2823 | AACUAGUUCCCUAAUGAUG | 5721 | CAUCAUUAGGGAACUAGUU |
| siRNA 2824 | 2824 | ACUAGUUCCCUAAUGAUGG | 5722 | CCAUCAUUAGGGAACUAGU |
| siRNA 2825 | 2825 | CUAGUUCCCUAAUGAUGGA | 5723 | UCCAUCAUUAGGGAACUAG |
| siRNA 2826 | 2826 | UAGUUCCCUAAUGAUGGAC | 5724 | GUCCAUCAUUAGGGAACUA |
| siRNA 2827 | 2827 | AGUUCCCUAAUGAUGGACU | 5725 | AGUCCAUCAUUAGGGAACU |
| siRNA 2828 | 2828 | GUUCCCUAAUGAUGGACUU | 5726 | AAGUCCAUCAUUAGGGAAC |
| siRNA 2829 | 2829 | UUCCCUAAUGAUGGACUUU | 5727 | AAAGUCCAUCAUUAGGGAA |
| siRNA 2830 | 2830 | UCCCUAAUGAUGGACUUUU | 5728 | AAAAGUCCAUCAUUAGGGA |
| siRNA 2831 | 2831 | CCCUAAUGAUGGACUUUUA | 5729 | UAAAAGUCCAUCAUUAGGG |
| siRNA 2832 | 2832 | CCUAAUGAUGGACUUUUAA | 5730 | UUAAAAGUCCAUCAUUAGG |
| siRNA 2833 | 2833 | CUAAUGAUGGACUUUUAAG | 5731 | CUUAAAAGUCCAUCAUUAG |
| siRNA 2834 | 2834 | UAAUGAUGGACUUUUAAGU | 5732 | ACUUAAAAGUCCAUCAUUA |
| siRNA 2835 | 2835 | AAUGAUGGACUUUUAAGUU | 5733 | AACUUAAAAGUCCAUCAUU |
| siRNA 2836 | 2836 | AUGAUGGACUUUUAAGUUG | 5734 | CAACUUAAAAGUCCAUCAU |
| siRNA 2837 | 2837 | UGAUGGACUUUUAAGUUGU | 5735 | ACAACUUAAAAGUCCAUCA |
| siRNA 2838 | 2838 | GAUGGACUUUUAAGUUGUU | 5736 | AACAACUUAAAAGUCCAUC |
| siRNA 2839 | 2839 | AUGGACUUUUAAGUUGUUU | 5737 | AAACAACUUAAAAGUCCAU |
| siRNA 2840 | 2840 | UGGACUUUUAAGUUGUUUC | 5738 | GAAACAACUUAAAAGUCCA |
| siRNA 2841 | 2841 | GGACUUUUAAGUUGUUUCC | 5739 | GGAAACAACUUAAAAGUCC |
| siRNA 2842 | 2842 | GACUUUUAAGUUGUUUCCU | 5740 | AGGAAACAACUUAAAAGUC |
| siRNA 2843 | 2843 | ACUUUUAAGUUGUUUCCUU | 5741 | AAGGAAACAACUUAAAAGU |
| siRNA 2844 | 2844 | CUUUUAAGUUGUUUCCUUU | 5742 | AAAGGAAACAACUUAAAAG |
| siRNA 2845 | 2845 | UUUUAAGUUGUUUCCUUUU | 5743 | AAAAGGAAACAACUUAAAA |
| siRNA 2846 | 2846 | UUUAAGUUGUUUCCUUUUU | 5744 | AAAAAGGAAACAACUUAAA |
| siRNA 2847 | 2847 | UUAAGUUGUUUCCUUUUUU | 5745 | AAAAAAGGAAACAACUUAA |
| siRNA 2848 | 2848 | UAAGUUGUUUCCUUUUUUU | 5746 | AAAAAAAGGAAACAACUUA |
| siRNA 2849 | 2849 | AAGUUGUUUCCUUUUUUUU | 5747 | AAAAAAAAGGAAACAACUU |
| siRNA 2850 | 2850 | AGUUGUUUCCUUUUUUUUU | 5748 | AAAAAAAAAGGAAACAACU |
| siRNA 2851 | 2851 | GUUGUUUCCUUUUUUUUUC | 5749 | GAAAAAAAAAGGAAACAAC |
| siRNA 2852 | 2852 | UUGUUUCCUUUUUUUUUCU | 5750 | AGAAAAAAAAAGGAAACAA |
| siRNA 2853 | 2853 | UGUUUCCUUUUUUUUUCUU | 5751 | AAGAAAAAAAAAGGAAACA |
| siRNA 2854 | 2854 | GUUUCCUUUUUUUUUCUUU | 5752 | AAAGAAAAAAAAAGGAAAC |
| siRNA 2855 | 2855 | UUUCCUUUUUUUUUCUUUU | 5753 | AAAAGAAAAAAAAAGGAAA |
| siRNA 2856 | 2856 | UUCCUUUUUUUUUCUUUUU | 5754 | AAAAAGAAAAAAAAAGGAA |
| siRNA 2857 | 2857 | UCCUUUUUUUUUCUUUUUU | 5755 | AAAAAAGAAAAAAAAAGGA |
| siRNA 2858 | 2858 | CCUUUUUUUUUCUUUUUUG | 5756 | CAAAAAAGAAAAAAAAAGG |
| siRNA 2859 | 2859 | CUUUUUUUUUCUUUUUUGC | 5757 | GCAAAAAAGAAAAAAAAAG |
| siRNA 2860 | 2860 | UUUUUUUUUCUUUUUUGCU | 5758 | AGCAAAAAAGAAAAAAAAA |
| siRNA 2861 | 2861 | UUUUUUUUCUUUUUUGCUA | 5759 | UAGCAAAAAAGAAAAAAAA |
| siRNA 2862 | 2862 | UUUUUUUCUUUUUUGCUAC | 5760 | GUAGCAAAAAAGAAAAAAA |
| siRNA 2863 | 2863 | UUUUUUCUUUUUUGCUACU | 5761 | AGUAGCAAAAAAGAAAAAA |
| siRNA 2864 | 2864 | UUUUUCUUUUUUGCUACUG | 5762 | CAGUAGCAAAAAAGAAAAA |
| siRNA 2865 | 2865 | UUUUCUUUUUUGCUACUGC | 5763 | GCAGUAGCAAAAAAGAAAA |
| siRNA 2866 | 2866 | UUUCUUUUUUGCUACUGCA | 5764 | UGCAGUAGCAAAAAAGAAA |
| siRNA 2867 | 2867 | UUCUUUUUUGCUACUGCAA | 5765 | UUGCAGUAGCAAAAAAGAA |
| siRNA 2868 | 2868 | UCUUUUUUGCUACUGCAAA | 5766 | UUUGCAGUAGCAAAAAAGA |
| siRNA 2869 | 2869 | CUUUUUUGCUACUGCAAAC | 5767 | GUUUGCAGUAGCAAAAAAG |
| siRNA 2870 | 2870 | UUUUUUGCUACUGCAAACG | 5768 | CGUUUGCAGUAGCAAAAAA |
| siRNA 2871 | 2871 | UUUUUGCUACUGCAAACGA | 5769 | UCGUUUGCAGUAGCAAAAA |
| siRNA 2872 | 2872 | UUUUGCUACUGCAAACGAU | 5770 | AUCGUUUGCAGUAGCAAAA |
| siRNA 2873 | 2873 | UUUGCUACUGCAAACGAUG | 5771 | CAUCGUUUGCAGUAGCAAA |
| siRNA 2874 | 2874 | UUGCUACUGCAAACGAUGC | 5772 | GCAUCGUUUGCAGUAGCAA |
| siRNA 2875 | 2875 | UGCUACUGCAAACGAUGCU | 5773 | AGCAUCGUUUGCAGUAGCA |
| siRNA 2876 | 2876 | GCUACUGCAAACGAUGCUA | 5774 | UAGCAUCGUUUGCAGUAGC |
| siRNA 2877 | 2877 | CUACUGCAAACGAUGCUAU | 5775 | AUAGCAUCGUUUGCAGUAG |
| siRNA 2878 | 2878 | UACUGCAAACGAUGCUAUA | 5776 | UAUAGCAUCGUUUGCAGUA |
| siRNA 2879 | 2879 | ACUGCAAACGAUGCUAUAA | 5777 | UUAUAGCAUCGUUUGCAGU |
| siRNA 2880 | 2880 | CUGCAAACGAUGCUAUAAU | 5778 | AUUAUAGCAUCGUUUGCAG |
| siRNA 2881 | 2881 | UGCAAACGAUGCUAUAAUA | 5779 | UAUUAUAGCAUCGUUUGCA |
| siRNA 2882 | 2882 | GCAAACGAUGCUAUAAUAA | 5780 | UUAUUAUAGCAUCGUUUGC |
| siRNA 2883 | 2883 | CAAACGAUGCUAUAAUAAA | 5781 | UUUAUUAUAGCAUCGUUUG |
| siRNA 2884 | 2884 | AAACGAUGCUAUAAUAAAU | 5782 | AUUUAUUAUAGCAUCGUUU |
| siRNA 2885 | 2885 | AACGAUGCUAUAAUAAAUG | 5783 | CAUUUAUUAUAGCAUCGUU |
| siRNA 2886 | 2886 | ACGAUGCUAUAAUAAAUGU | 5784 | ACAUUUAUUAUAGCAUCGU |
| siRNA 2887 | 2887 | CGAUGCUAUAAUAAAUGUC | 5785 | GACAUUUAUUAUAGCAUCG |
| siRNA 2888 | 2888 | GAUGCUAUAAUAAAUGUCC | 5786 | GGACAUUUAUUAUAGCAUC |
| siRNA 2889 | 2889 | AUGCUAUAAUAAAUGUCCU | 5787 | AGGACAUUUAUUAUAGCAU |
| siRNA 2890 | 2890 | UGCUAUAAUAAAUGUCCUU | 5788 | AAGGACAUUUAUUAUAGCA |
| siRNA 2891 | 2891 | GCUAUAAUAAAUGUCCUUA | 5789 | UAAGGACAUUUAUUAUAGC |
| siRNA 2892 | 2892 | CUAUAAUAAAUGUCCUUAU | 5790 | AUAAGGACAUUUAUUAUAG |
| siRNA 2893 | 2893 | UAUAAUAAAUGUCCUUAUC | 5791 | GAUAAGGACAUUUAUUAUA |
| siRNA 2894 | 2894 | AUAAUAAAUGUCCUUAUCA | 5792 | UGAUAAGGACAUUUAUUAU |
| siRNA 2895 | 2895 | UAAUAAAUGUCCUUAUCAA | 5793 | UUGAUAAGGACAUUUAUUA |
| siRNA 2896 | 2896 | AAUAAAUGUCCUUAUCAAA | 5794 | UUUGAUAAGGACAUUUAUU |
| siRNA 2897 | 2897 | AUAAAUGUCCUUAUCAAAA | 5795 | UUUUGAUAAGGACAUUUAU |
| siRNA 2898 | 2898 | UAAAUGUCCUUAUCAAAAA | 5796 | UUUUUGAUAAGGACAUUUA |

Additional Sequence

| SEQ ID | |
|---|---|
| NO: | 5′ to 3′ Sequence |
| 5895 | ACTCTGCAGCCTGGGCTCTGTGAGACTGAGG |
| | TGGCGGTCAGCCGGAGTGAGTGTTGGGGTC |
| | CTGGGGCACCTGCCTTACATGGCTTGTTTA |
| | TGAACATTAAAGGGAAGAAGTTGAAGCTTG |
| | AGGAGCGAGGATGGCAGTCAACAAAGGCCT |
| | CACCTTGCTGGATGGAGACCTCCCTGAGCA |
| | GGAGAATGTGCTGCAGCGGGTCCTGCAGCT |
| | GCCGGTGGTGAGTGGCACCTGCGAATGCTT |
| | CCAGAAGACCTACACCAGCACTAAGGAAGC |
| | CCACCCCCTGGTGGCCTCTGTGTGCAATGC |
| | CTATGAGAAGGGCGTGCAGAGCGCCAGTAG |
| | CTTGGCTGCCTGGAGCATGGAGCCGGTGGT |
| | CCGCAGGCTGTCCACCCAGTTCACAGCTGC |
| | CAATGAGCTGGCCTGCCGAGGCTTGGACCA |
| | CCTGGAGGAAAAGATCCCCGCCCTCCAGTA |
| | CCCCCCTGAAAAGATTGCTTCTGAGCTGAA |
| | GGACACCATCTCCACCCGCCTCCGCAGTGC |
| | CAGAAACAGCATCAGCGTTCCCATCGCGAG |
| | CACTTCAGACAAGGTCCTGGGGGCCGCTTT |
| | GGCCGGGTGCGAGCTTGCCTGGGGGGTGGC |
| | CAGAGACACTGCGGAATTTGCTGCCAACAC |
| | TCGAGCTGGCCGACTGGCTTCTGGAGGGGC |
| | CGACTTGGCCTTGGGCAGCATTGAGAAGGT |
| | GGTGGAGTACCTCCTCCCTCCAGACAAGGA |
| | AGAGTCAGCCCCTGCTCCTGGACACCAGCA |
| | AGCCCAGAAGTCTCCCAAGGCCAAGCCAAG |
| | CCTCTTGAGCAGGGTTGGGGCTCTGACCAA |
| | CACCCTCTCTCGATACACCGTGCAGACCAT |
| | GGCCCGGGCCCTGGAGCAGGGCCACACCGT |
| | GGCCATGTGGATCCCAGGCGTGGTGCCCCT |
| | GAGCAGCCTGGCCCAGTGGGGTGCCTCAGT |
| | GGCCATGCAGGCGGTGTCCCGGCGGAGGAG |
| | CGAAGTGCGGGTACCCTGGCTGCACAGCCT |
| | CGCAGCCGCCCAGGAGGAGGATCATGAGGA |
| | CCAGACAGACACGGAGGGAGAGGACACGGA |
| | GGAGGAGGAAGAATTGGAGACTGAGGAGAA |
| | CAAGTTCAGTGAGGTAGCAGCCCTGCCAGG |
| | CCCTCGAGGCCTCCTGGGTGGTGTGGCACA |
| | TACCCTGCAGAAGACCCTCCAGACCACCAT |
| | CTCGGCTGTGACATGGGCACCTGCAGCTGT |
| | GCTGGGCATGGCAGGGAGGGTGCTGCACCT |
| | CACACCAGCCCCTGCTGTCTCCTCAACCAA |
| | GGGGAGGGCCATGTCCCTATCAGATGCCCT |
| | GAAGGGCGTTACTGACAACGTGGTGGACAC |
| | AGTGGTGCATTACGTGCCGCTCCCCAGGCT |
| | GTCGCTGATGGAGCCCGAGAGCGAATTCCG |
| | GGACATCGACAACCCACCAGCCGAGGTCGA |
| | GCGCCGGGAGGCGGAGCGCAGAGCGTCTGG |
| | GGCGCCGTCCGCCGGCCCGGAGCCCGCCCC |
| | GCGTCTCGCACAGCCCCGCCGCAGCCTGCG |
| | CAGCGCGCAGAGCCCCGGCGCGCCCCCCGG |
| | CCCGGGCCTGGAGGACGAAGTCGCCACGCC |
| | CGCAGCGCCGCGCCCGGGCTTCCCGGCCGT |
| | GCCCCGCGAGAAGCCAAAGCGCAGGGTCAG |
| | CGACAGCTTCTTCCGGCCCAGCGTCATGGA |
| | GCCCATCCTGGGCCGCACGCATTACAGCCA |
| | GCTGCGCAAGAAGAGCTGAGTCGCCGCACC |
| | AGCCGCCGCGCCCCGGGCCGGCGGGTTTCT |
| | CTAACAAATAAACAGAACCCGCACTGCCCA |
| | GGCGAGCGTTGCCACTTTCAAAGTGGTCCC |
| | CTGGGGAGCTCAGCCTCATCCTGATGATGC |
| | TGCCAAGGCGCACTTTTTATTTTTATTTTA |
| | TTTTTATTTTTTTTTTAGCATCCTTTTGGG |
| | GCTTCACTCTCAGAGCCAGTTTTTAAGGGA |
| | CACCAGAGCCGCAGCCTGCTCTGATTCTAT |
| | GGCTTGGTTGTTACTATAAGAGTAATTGCC |
| | TAACTTGATTTTTCATCTCTTTAACCAAAC |
| | TTGTGGCCAAAAGATATTTGACCGTTTCCA |
| | AAATTCAGATTCTGCCTCTGCGGATAAATA |
| | TTTGCCACGAATGAGTAACTCCTGTCACCA |
| | CTCTGAAGGTCCAGACAGAAGGTTTTGACA |
| | CATTCTTAGCACTGAACTCCTCTGTGATCT |
| | AGGATGATCTGTTCCCCCTCTGATGAACAT |
| | CCTCTGATGATCTAGGCTCCCAGCAGGCTA |
| | CTTTGAAGGGAACAATCAGATGCAAAAGCT |
| | CTTGGGTGTTTATTTAAAATACTAGTGTCA |
| | CTTTCTGAGTACCCGCCGCTTCACAGGCTG |
| | AGTCCAGGCCTGTGTGCTTTGTAGAGCCAG |
| | CTGCTTGCTCACAGCCACATTTCCATTTGC |
| | ATCATTACTGCCTTCACCTGCATAGTCACT |
| | CTTTTGATGCTGGGGAACCAAAATGGTGAT |
| | GATATATAGACTTTATGTATAGCCACAGTT |
| | CATCCCCAACCCTAGTCTTCGAAATGTTAA |
| | TATTTGATAAATCTAGAAAATGCATTCATA |
| | CAATTACAGAATTCAAATATTGCAAAAGGA |
| | TGTGTGTCTTTCTCCCCGAGCTCCCCTGTT |
| | CCCCTTCATTGAAAACCACCACGGTGCCAT |
| | CTCTTGTGTATGCAGGGCTATGCACCTGCA |
| | GGCACGTGTGTATGCACTCCCCGCTTGTGT |
| | TTACACAAGCTGTGGGGTGTTACGCATGCC |
| | TGCTTTTTTCACTTAATAATACAGCTTGGA |
| | GAGATTTTTGTATCACATTATAAATCCCAC |
| | TCGCTCTTTTTGATGGCCACATAATAACTA |
| | CTGCATAATATGGATACGCCTTATTTGATT |
| | TAACTAGTTCCCTAATGATGGACTTTTAAG |
| | TTGTTTCCTTTTTTTTTCTTTTTTGCTACT |
| | GCAAACGATGCTATAATAAATGTCCTTATC |
| | AAAAA |

What is claimed is:

1. A composition comprising an oligonucleotide that targets PLIN1 and when administered to a subject in an effective amount decreases circulating cholesterol, triglycerides, APOB, glucose, hemoglobin A1c, alanine aminotransferase, aspartate aminotransferase, alkaline phosphatase, or gamma-glutamyl transferase in a subject.

2. The composition of claim 1, wherein the cholesterol comprises total cholesterol, low density lipoprotein cholesterol, or non-high density lipoprotein cholesterol.

3. The composition of claim 1, wherein the decrease is by about 10% or more, as compared to prior to administration.

4. A composition comprising an oligonucleotide that targets PLIN1 and when administered to a subject in an effective amount decreases systolic blood pressure or diastolic blood pressure in a subject.

5. The composition of claim 4, wherein the decrease is by about 10% or more, as compared to prior to administration.

6. A composition comprising an oligonucleotide that targets PLIN1 and when administered to a subject in an effective amount decreases a liver fibrosis score, non-alcoholic fatty liver disease (NAFLD) fibrosis score, NAFLD activity score, or liver fat percentage in a subject.

7. The composition of claim 6, wherein the decrease is by about 10% or more, as compared to prior to administration.

8. A composition comprising an oligonucleotide that targets PLIN1 and when administered to a subject in an effective amount increases circulating high density lipoprotein cholesterol or apolipoprotein A1 in a subject.

9. The composition of claim 8, wherein the increase is by about 10% or more, as compared to prior to administration.

10. A composition comprising an oligonucleotide that targets PLIN1 and when administered to a subject in an effective amount increases left ventricular ejection fraction in a subject.

11. The composition of claim 10, wherein the increase is by about 10% or more, as compared to prior to administration.

12. A composition comprising an oligonucleotide that targets PLIN1 and when administered to a subject in an effective amount increases insulin sensitivity in a subject.

13. The composition of claim 12, wherein the increase is by about 10% or more, as compared to prior to administration.

14. The composition of any one of claims 1-13, wherein the oligonucleotide comprises a modified internucleoside linkage.

15. The composition of claim 14, wherein the modified internucleoside linkage comprises alkylphosphonate, phosphorothioate, methylphosphonate, phosphorodithioate, alkylphosphonothioate, phosphoramidate, carbamate, carbonate, phosphate triester, acetamidate, or carboxymethyl ester, or a combination thereof.

16. The composition of claim 14, wherein the modified internucleoside linkage comprises one or more phosphorothioate linkages.

17. The composition of any one of claims 1-13, wherein the oligonucleotide comprises 1, 2, 3, 4, 5, 6, 7, 8, 9, 10, 11, 12, 13, 14, 15, 16, 17, 18, 19, or 20 modified internucleoside linkages.

18. The composition of any one of claims 1-13, wherein the oligonucleotide comprises a modified nucleoside.

19. The composition of claim 18, wherein the modified nucleoside comprises a locked nucleic acid (LNA), hexitol nucleic acid (HLA), cyclohexene nucleic acid (CeNA), 2′-methoxyethyl, 2′-O-alkyl, 2′-O-allyl, 2′-O-allyl, 2′-fluoro, or 2′-deoxy, or a combination thereof.

20. The composition of claim 18, wherein the modified nucleoside comprises a LNA.

21. The composition of claim 18, wherein the modified nucleoside comprises a 2′,4″ constrained ethyl nucleic acid.

22. The composition of claim 18, wherein the modified nucleoside comprises a 2′-O-methyl nucleoside, 2′-deoxy fluoro nucleoside, 2′-O—N-methylacetamido (2′-O-NMA) nucleoside, a 2′-O-dimethylaminoethoxyethyl (2′-O-DMAEOE) nucleoside, 2′-O-aminopropyl (2′-O-AP) nucleoside, or 2′-ara-F, or a combination thereof.

23. The composition of claim 18, wherein the modified nucleoside comprises one or more 2 fluoro modified nucleosides.

24. The composition of claim 18, wherein the modified nucleoside comprises a 2′ O-alkyl modified nucleoside.

25. The composition of any one of claims 1-13, wherein the oligonucleotide comprises 1, 2, 3, 4, 5, 6, 7, 8, 9, 10, 11, 12, 13, 14, 15, 16, 17, 18, 19, 20, or 21 modified nucleosides.

26. The composition of any one of claims 1-13, wherein the oligonucleotide comprises a lipid attached at a 3′ or 5′ terminus of the oligonucleotide.

27. The composition of claim 26, wherein the lipid comprises cholesterol, myristoyl, palmitoyl, stearoyl, lithocholyl, docosanoyl, docosahexaenoyl, myristyl, palmityl stearyl, or α-tocopherol, or a combination thereof.

28. The composition of any one of claims 1-13, wherein the oligonucleotide comprises a sugar moiety attached at a 3′ or 5′ terminus of the oligonucleotide.

29. The composition of claim 28, wherein the sugar comprises N-acetylgalactosamine (GalNAc), N-acetylglucosamine (GlcNAc), or mannose.

30. The composition of any one of claims 1-13, wherein the oligonucleotide comprises a small interfering RNA (siRNA) comprising a sense strand and an antisense strand.

31. The composition of claim 30, wherein the sense strand is 12-30 nucleosides in length.

32. The composition of claim 30, wherein the antisense strand is 12-30 nucleosides in length.

33. A composition comprising an oligonucleotide that inhibits the expression of PLIN1, wherein the oligonucleotide comprises an siRNA comprising a sense strand and an antisense strand, each strand is independently about 12-30 nucleosides in length, and at least one of the sense strand and the antisense strand comprises a nucleoside sequence comprising about 12-30 contiguous nucleosides of SEQ ID NO: 6014.

34. The composition of claim 30, wherein any one of the following is true with regard to the sense strand:
all purines comprise 2′ fluoro modified purines, and all pyrimidines comprise a mixture of 2′ fluoro and 2′ methyl modified pyrimidines:
all purines comprise 2′ methyl modified purines, and all pyrimidines comprise a mixture of 2′ fluoro and 2′ methyl modified pyrimidines:
all purines comprise 2′ fluoro modified purines, and all pyrimidines comprise 2′ methyl modified pyrimidines:
all pyrimidines comprise 2′ fluoro modified pyrimidines, and all purines comprise a mixture of 2′ fluoro and 2′ methyl modified purines:
all pyrimidines comprise 2′ methyl modified pyrimidines, and all purines comprise a mixture of 2′ fluoro and 2′ methyl modified purines; or
all pyrimidines comprise 2′ fluoro modified pyrimidines, and all purines comprise 2′ methyl modified purines.

35. The composition of claim 30, wherein any one of the following is true with regard to the antisense strand:
all purines comprise 2′ fluoro modified purines, and all pyrimidines comprise a mixture of 2′ fluoro and 2′ methyl modified pyrimidines:
all purines comprise 2′ methyl modified purines, and all pyrimidines comprise a mixture of 2′ fluoro and 2′ methyl modified pyrimidines:
all purines comprise 2′ methyl modified purines, and all pyrimidines comprise 2′ fluoro modified pyrimidines:
all pyrimidines comprise 2′ fluoro modified pyrimidines, and all purines comprise a mixture of 2′ fluoro and 2′ methyl modified purines:
all pyrimidines comprise 2′ methyl modified pyrimidines, and all purines comprise a mixture of 2′ fluoro and 2′ methyl modified purines; or
all pyrimidines comprise 2′ methyl modified pyrimidines, and all purines comprise 2′ fluoro modified purines.

36. The composition of any one of claims 1-13, wherein the oligonucleotide comprises an antisense oligonucleotide (ASO).

37. The composition of claim 36, wherein the ASO is 12-30 nucleosides in length.

38. A composition comprising an oligonucleotide that inhibits the expression of PLIN1, wherein the oligonucleotide comprises an ASO about 12-30 nucleosides in length and a nucleoside sequence complementary to about 12-30 contiguous nucleosides of SEQ ID NO: 6014.

39. The composition of any one of claims 1-13, further comprising a pharmaceutically acceptable carrier.

40. A method of treating a subject having a cardiometabolic disorder, comprising administering an effective amount of the composition of claim 39 to the subject.

41. The method of claim 40, wherein the cardiometabolic disorder comprises hyperlipidemia, hypertriglyceridemia, cardiovascular disease, coronary artery disease, myocardial infarction, heart failure, cerebrovascular disease, stroke, peripheral vascular disease, peripheral arterial disease, hypertension, diabetes, NAFLD, or non-alcoholic steatohepatitis.

The application's sequence listing, which the Patent Office published only in electronic form, follows.

SEQUENCE LISTING (6075 sequences)

SEQ ID NO: 1 - RNA, 19 nt, Artificial Sequence
  Description of Artificial Sequence: Synthetic oligonucleotide
acucugcagccugggcucu

SEQ ID NO: 2 - RNA, 19 nt, Artificial Sequence
  Description of Artificial Sequence: Synthetic oligonucleotide
cucugcagccugggcucug

SEQ ID NO: 3 - RNA, 19 nt, Artificial Sequence
  Description of Artificial Sequence: Synthetic oligonucleotide
ucugcagccugggcucugu

SEQ ID NO: 4 - RNA, 19 nt, Artificial Sequence
  Description of Artificial Sequence: Synthetic oligonucleotide
cugcagccugggcucugug

SEQ ID NO: 5 - RNA, 19 nt, Artificial Sequence
  Description of Artificial Sequence: Synthetic oligonucleotide
ugcagccugggcucuguga

SEQ ID NO: 6 - RNA, 19 nt, Artificial Sequence
  Description of Artificial Sequence: Synthetic oligonucleotide
gcagccugggcucugugag

SEQ ID NO: 7 - RNA, 19 nt, Artificial Sequence
  Description of Artificial Sequence: Synthetic oligonucleotide
cagccugggcucugugaga

SEQ ID NO: 8 - RNA, 19 nt, Artificial Sequence
  Description of Artificial Sequence: Synthetic oligonucleotide
agccugggcucugugagac

SEQ ID NO: 9 - RNA, 19 nt, Artificial Sequence
  Description of Artificial Sequence: Synthetic oligonucleotide
gccugggcucugugagacu

SEQ ID NO: 10 - RNA, 19 nt, Artificial Sequence
  Description of Artificial Sequence: Synthetic oligonucleotide
ccugggcucugugagacug

SEQ ID NO: 11 - RNA, 19 nt, Artificial Sequence
  Description of Artificial Sequence: Synthetic oligonucleotide
cugggcucugugagacuga

SEQ ID NO: 12 - RNA, 19 nt, Artificial Sequence
  Description of Artificial Sequence: Synthetic oligonucleotide
ugggcucugugagacugag

SEQ ID NO: 13 - RNA, 19 nt, Artificial Sequence
  Description of Artificial Sequence: Synthetic oligonucleotide
gggcucugugagacugagg

SEQ ID NO: 14 - RNA, 19 nt, Artificial Sequence
  Description of Artificial Sequence: Synthetic oligonucleotide
ggcucugugagacugaggu

SEQ ID NO: 15 - RNA, 19 nt, Artificial Sequence
  Description of Artificial Sequence: Synthetic oligonucleotide
gcucugugagacugaggug

SEQ ID NO: 16 - RNA, 19 nt, Artificial Sequence
  Description of Artificial Sequence: Synthetic oligonucleotide
cucugugagacugaggugg

SEQ ID NO: 17 - RNA, 19 nt, Artificial Sequence
  Description of Artificial Sequence: Synthetic oligonucleotide
ucugugagacugagguggc

SEQ ID NO: 18 - RNA, 19 nt, Artificial Sequence
  Description of Artificial Sequence: Synthetic oligonucleotide
cugugagacugagguggcg

SEQ ID NO: 19 - RNA, 19 nt, Artificial Sequence
  Description of Artificial Sequence: Synthetic oligonucleotide
ugugagacugagguggcgg

SEQ ID NO: 20 - RNA, 19 nt, Artificial Sequence
  Description of Artificial Sequence: Synthetic oligonucleotide
gugagacugagguggcggu

SEQ ID NO: 21 - RNA, 19 nt, Artificial Sequence
  Description of Artificial Sequence: Synthetic oligonucleotide
ugagacugagguggcgguc

SEQ ID NO: 22 - RNA, 19 nt, Artificial Sequence
  Description of Artificial Sequence: Synthetic oligonucleotide
gagacugagguggcgguca

SEQ ID NO: 23 - RNA, 19 nt, Artificial Sequence
  Description of Artificial Sequence: Synthetic oligonucleotide
agacugagguggcggucag

SEQ ID NO: 24 - RNA, 19 nt, Artificial Sequence
  Description of Artificial Sequence: Synthetic oligonucleotide
gacugagguggcggucagc

SEQ ID NO: 25 - RNA, 19 nt, Artificial Sequence
  Description of Artificial Sequence: Synthetic oligonucleotide
acugagguggcggucagcc

SEQ ID NO: 26 - RNA, 19 nt, Artificial Sequence
  Description of Artificial Sequence: Synthetic oligonucleotide
cugagguggcggucagccg

SEQ ID NO: 27 - RNA, 19 nt, Artificial Sequence
  Description of Artificial Sequence: Synthetic oligonucleotide
ugagguggcggucagccgg

SEQ ID NO: 28 - RNA, 19 nt, Artificial Sequence
  Description of Artificial Sequence: Synthetic oligonucleotide
gagguggcggucagccgga

SEQ ID NO: 29 - RNA, 19 nt, Artificial Sequence
  Description of Artificial Sequence: Synthetic oligonucleotide
agguggcggucagccggag

SEQ ID NO: 30 - RNA, 19 nt, Artificial Sequence
  Description of Artificial Sequence: Synthetic oligonucleotide
gguggcggucagccggagu

SEQ ID NO: 31 - RNA, 19 nt, Artificial Sequence
  Description of Artificial Sequence: Synthetic oligonucleotide
guggcggucagccggagug

SEQ ID NO: 32 - RNA, 19 nt, Artificial Sequence
  Description of Artificial Sequence: Synthetic oligonucleotide
uggcggucagccggaguga

SEQ ID NO: 33 - RNA, 19 nt, Artificial Sequence
  Description of Artificial Sequence: Synthetic oligonucleotide
ggcggucagccggagugag

SEQ ID NO: 34 - RNA, 19 nt, Artificial Sequence
  Description of Artificial Sequence: Synthetic oligonucleotide
gcggucagccggagugagu

SEQ ID NO: 35 - RNA, 19 nt, Artificial Sequence
  Description of Artificial Sequence: Synthetic oligonucleotide
cggucagccggagugagug

SEQ ID NO: 36 - RNA, 19 nt, Artificial Sequence
  Description of Artificial Sequence: Synthetic oligonucleotide
ggucagccggagugagugu

SEQ ID NO: 37 - RNA, 19 nt, Artificial Sequence
  Description of Artificial Sequence: Synthetic oligonucleotide
gucagccggagugaguguu

SEQ ID NO: 38 - RNA, 19 nt, Artificial Sequence
  Description of Artificial Sequence: Synthetic oligonucleotide
ucagccggagugaguguug

SEQ ID NO: 39 - RNA, 19 nt, Artificial Sequence
  Description of Artificial Sequence: Synthetic oligonucleotide
cagccggagugaguguugg

SEQ ID NO: 40 - RNA, 19 nt, Artificial Sequence
  Description of Artificial Sequence: Synthetic oligonucleotide
agccggagugaguguuggg

SEQ ID NO: 41 - RNA, 19 nt, Artificial Sequence
  Description of Artificial Sequence: Synthetic oligonucleotide
gccggagugaguguugggg

SEQ ID NO: 42 - RNA, 19 nt, Artificial Sequence
  Description of Artificial Sequence: Synthetic oligonucleotide
ccggagugaguguuggggu

SEQ ID NO: 43 - RNA, 19 nt, Artificial Sequence
  Description of Artificial Sequence: Synthetic oligonucleotide
cggagugaguguugggguc

SEQ ID NO: 44 - RNA, 19 nt, Artificial Sequence
  Description of Artificial Sequence: Synthetic oligonucleotide
ggagugaguguuggggucc

SEQ ID NO: 45 - RNA, 19 nt, Artificial Sequence
  Description of Artificial Sequence: Synthetic oligonucleotide
gagugaguguugggguccu

SEQ ID NO: 46 - RNA, 19 nt, Artificial Sequence
  Description of Artificial Sequence: Synthetic oligonucleotide
agugaguguugggguccug

SEQ ID NO: 47 - RNA, 19 nt, Artificial Sequence
  Description of Artificial Sequence: Synthetic oligonucleotide
gugaguguugggguccugg

SEQ ID NO: 48 - RNA, 19 nt, Artificial Sequence
  Description of Artificial Sequence: Synthetic oligonucleotide
ugaguguugggguccuggg

SEQ ID NO: 49 - RNA, 19 nt, Artificial Sequence
  Description of Artificial Sequence: Synthetic oligonucleotide
gaguguugggguccugggg

SEQ ID NO: 50 - RNA, 19 nt, Artificial Sequence
  Description of Artificial Sequence: Synthetic oligonucleotide
aguguugggguccuggggc

SEQ ID NO: 51 - RNA, 19 nt, Artificial Sequence
  Description of Artificial Sequence: Synthetic oligonucleotide
guguugggguccuggggca

SEQ ID NO: 52 - RNA, 19 nt, Artificial Sequence
  Description of Artificial Sequence: Synthetic oligonucleotide
uguugggguccuggggcac

SEQ ID NO: 53 - RNA, 19 nt, Artificial Sequence
  Description of Artificial Sequence: Synthetic oligonucleotide
guugggguccuggggcacc

SEQ ID NO: 54 - RNA, 19 nt, Artificial Sequence
  Description of Artificial Sequence: Synthetic oligonucleotide
uugggguccuggggcaccu

SEQ ID NO: 55 - RNA, 19 nt, Artificial Sequence
  Description of Artificial Sequence: Synthetic oligonucleotide
ugggguccuggggcaccug

SEQ ID NO: 56 - RNA, 19 nt, Artificial Sequence
  Description of Artificial Sequence: Synthetic oligonucleotide
gggguccuggggcaccugc

SEQ ID NO: 57 - RNA, 19 nt, Artificial Sequence
  Description of Artificial Sequence: Synthetic oligonucleotide
ggguccuggggcaccugcc

SEQ ID NO: 58 - RNA, 19 nt, Artificial Sequence
  Description of Artificial Sequence: Synthetic oligonucleotide
gguccuggggcaccugccu

SEQ ID NO: 59 - RNA, 19 nt, Artificial Sequence
  Description of Artificial Sequence: Synthetic oligonucleotide
guccuggggcaccugccuu

SEQ ID NO: 60 - RNA, 19 nt, Artificial Sequence
  Description of Artificial Sequence: Synthetic oligonucleotide
uccuggggcaccugccuua

SEQ ID NO: 61 - RNA, 19 nt, Artificial Sequence
  Description of Artificial Sequence: Synthetic oligonucleotide
ccuggggcaccugccuuac

SEQ ID NO: 62 - RNA, 19 nt, Artificial Sequence
  Description of Artificial Sequence: Synthetic oligonucleotide
cuggggcaccugccuuaca

SEQ ID NO: 63 - RNA, 19 nt, Artificial Sequence
  Description of Artificial Sequence: Synthetic oligonucleotide
uggggcaccugccuuacau

SEQ ID NO: 64 - RNA, 19 nt, Artificial Sequence
  Description of Artificial Sequence: Synthetic oligonucleotide
ggggcaccugccuuacaug

SEQ ID NO: 65 - RNA, 19 nt, Artificial Sequence
  Description of Artificial Sequence: Synthetic oligonucleotide
gggcaccugccuuacaugg

SEQ ID NO: 66 - RNA, 19 nt, Artificial Sequence
  Description of Artificial Sequence: Synthetic oligonucleotide
ggcaccugccuuacauggc

SEQ ID NO: 67 - RNA, 19 nt, Artificial Sequence
  Description of Artificial Sequence: Synthetic oligonucleotide
gcaccugccuuacauggcu

SEQ ID NO: 68 - RNA, 19 nt, Artificial Sequence
  Description of Artificial Sequence: Synthetic oligonucleotide
caccugccuuacauggcuu

SEQ ID NO: 69 - RNA, 19 nt, Artificial Sequence
  Description of Artificial Sequence: Synthetic oligonucleotide
accugccuuacauggcuug

SEQ ID NO: 70 - RNA, 19 nt, Artificial Sequence
  Description of Artificial Sequence: Synthetic oligonucleotide
ccugccuuacauggcuugu

SEQ ID NO: 71 - RNA, 19 nt, Artificial Sequence
  Description of Artificial Sequence: Synthetic oligonucleotide
cugccuuacauggcuuguu

SEQ ID NO: 72 - RNA, 19 nt, Artificial Sequence
  Description of Artificial Sequence: Synthetic oligonucleotide
ugccuuacauggcuuguuu

SEQ ID NO: 73 - RNA, 19 nt, Artificial Sequence
  Description of Artificial Sequence: Synthetic oligonucleotide
gccuuacauggcuuguuua

SEQ ID NO: 74 - RNA, 19 nt, Artificial Sequence
  Description of Artificial Sequence: Synthetic oligonucleotide
ccuuacauggcuuguuuau

SEQ ID NO: 75 - RNA, 19 nt, Artificial Sequence
  Description of Artificial Sequence: Synthetic oligonucleotide
cuuacauggcuuguuuaug

SEQ ID NO: 76 - RNA, 19 nt, Artificial Sequence
  Description of Artificial Sequence: Synthetic oligonucleotide
uuacauggcuuguuuauga

SEQ ID NO: 77 - RNA, 19 nt, Artificial Sequence
  Description of Artificial Sequence: Synthetic oligonucleotide
uacauggcuuguuuaugaa

SEQ ID NO: 78 - RNA, 19 nt, Artificial Sequence
  Description of Artificial Sequence: Synthetic oligonucleotide
acauggcuuguuuaugaac

SEQ ID NO: 79 - RNA, 19 nt, Artificial Sequence
  Description of Artificial Sequence: Synthetic oligonucleotide
cauggcuuguuuaugaaca

SEQ ID NO: 80 - RNA, 19 nt, Artificial Sequence
  Description of Artificial Sequence: Synthetic oligonucleotide
auggcuuguuuaugaacau

SEQ ID NO: 81 - RNA, 19 nt, Artificial Sequence
  Description of Artificial Sequence: Synthetic oligonucleotide
uggcuuguuuaugaacauu

SEQ ID NO: 82 - RNA, 19 nt, Artificial Sequence
  Description of Artificial Sequence: Synthetic oligonucleotide
ggcuuguuuaugaacauua

SEQ ID NO: 83 - RNA, 19 nt, Artificial Sequence
  Description of Artificial Sequence: Synthetic oligonucleotide
gcuuguuuaugaacauuaa

SEQ ID NO: 84 - RNA, 19 nt, Artificial Sequence
  Description of Artificial Sequence: Synthetic oligonucleotide
cuuguuuaugaacauuaaa

SEQ ID NO: 85 - RNA, 19 nt, Artificial Sequence
  Description of Artificial Sequence: Synthetic oligonucleotide
uuguuuaugaacauuaaag

SEQ ID NO: 86 - RNA, 19 nt, Artificial Sequence
  Description of Artificial Sequence: Synthetic oligonucleotide
uguuuaugaacauuaaagg

SEQ ID NO: 87 - RNA, 19 nt, Artificial Sequence
  Description of Artificial Sequence: Synthetic oligonucleotide
guuuaugaacauuaaaggg

SEQ ID NO: 88 - RNA, 19 nt, Artificial Sequence
  Description of Artificial Sequence: Synthetic oligonucleotide
uuuaugaacauuaaaggga

SEQ ID NO: 89 - RNA, 19 nt, Artificial Sequence
  Description of Artificial Sequence: Synthetic oligonucleotide
uuaugaacauuaaagggaa

SEQ ID NO: 90 - RNA, 19 nt, Artificial Sequence
  Description of Artificial Sequence: Synthetic oligonucleotide
uaugaacauuaaagggaag

SEQ ID NO: 91 - RNA, 19 nt, Artificial Sequence
  Description of Artificial Sequence: Synthetic oligonucleotide
augaacauuaaagggaaga

SEQ ID NO: 92 - RNA, 19 nt, Artificial Sequence
  Description of Artificial Sequence: Synthetic oligonucleotide
ugaacauuaaagggaagaa

SEQ ID NO: 93 - RNA, 19 nt, Artificial Sequence
  Description of Artificial Sequence: Synthetic oligonucleotide
gaacauuaaagggaagaag

SEQ ID NO: 94 - RNA, 19 nt, Artificial Sequence
  Description of Artificial Sequence: Synthetic oligonucleotide
aacauuaaagggaagaagu

SEQ ID NO: 95 - RNA, 19 nt, Artificial Sequence
  Description of Artificial Sequence: Synthetic oligonucleotide
acauuaaagggaagaaguu

SEQ ID NO: 96 - RNA, 19 nt, Artificial Sequence
  Description of Artificial Sequence: Synthetic oligonucleotide
cauuaaagggaagaaguug

SEQ ID NO: 97 - RNA, 19 nt, Artificial Sequence
  Description of Artificial Sequence: Synthetic oligonucleotide
auuaaagggaagaaguuga

SEQ ID NO: 98 - RNA, 19 nt, Artificial Sequence
  Description of Artificial Sequence: Synthetic oligonucleotide
uuaaagggaagaaguugaa

SEQ ID NO: 99 - RNA, 19 nt, Artificial Sequence
  Description of Artificial Sequence: Synthetic oligonucleotide
uaaagggaagaaguugaag

SEQ ID NO: 100 - RNA, 19 nt, Artificial Sequence
  Description of Artificial Sequence: Synthetic oligonucleotide
aaagggaagaaguugaagc

SEQ ID NO: 101 - RNA, 19 nt, Artificial Sequence
  Description of Artificial Sequence: Synthetic oligonucleotide
aagggaagaaguugaagcu

SEQ ID NO: 102 - RNA, 19 nt, Artificial Sequence
  Description of Artificial Sequence: Synthetic oligonucleotide
agggaagaaguugaagcuu

SEQ ID NO: 103 - RNA, 19 nt, Artificial Sequence
  Description of Artificial Sequence: Synthetic oligonucleotide
gggaagaaguugaagcuug

SEQ ID NO: 104 - RNA, 19 nt, Artificial Sequence
  Description of Artificial Sequence: Synthetic oligonucleotide
ggaagaaguugaagcuuga

SEQ ID NO: 105 - RNA, 19 nt, Artificial Sequence
  Description of Artificial Sequence: Synthetic oligonucleotide
gaagaaguugaagcuugag

SEQ ID NO: 106 - RNA, 19 nt, Artificial Sequence
  Description of Artificial Sequence: Synthetic oligonucleotide
aagaaguugaagcuugagg

SEQ ID NO: 107 - RNA, 19 nt, Artificial Sequence
  Description of Artificial Sequence: Synthetic oligonucleotide
agaaguugaagcuugagga

SEQ ID NO: 108 - RNA, 19 nt, Artificial Sequence
  Description of Artificial Sequence: Synthetic oligonucleotide
gaaguugaagcuugaggag

SEQ ID NO: 109 - RNA, 19 nt, Artificial Sequence
  Description of Artificial Sequence: Synthetic oligonucleotide
aaguugaagcuugaggagc

SEQ ID NO: 110 - RNA, 19 nt, Artificial Sequence
  Description of Artificial Sequence: Synthetic oligonucleotide
aguugaagcuugaggagcg

SEQ ID NO: 111 - RNA, 19 nt, Artificial Sequence
  Description of Artificial Sequence: Synthetic oligonucleotide
guugaagcuugaggagcga

SEQ ID NO: 112 - RNA, 19 nt, Artificial Sequence
  Description of Artificial Sequence: Synthetic oligonucleotide
uugaagcuugaggagcgag

SEQ ID NO: 113 - RNA, 19 nt, Artificial Sequence
  Description of Artificial Sequence: Synthetic oligonucleotide
ugaagcuugaggagcgagg

SEQ ID NO: 114 - RNA, 19 nt, Artificial Sequence
  Description of Artificial Sequence: Synthetic oligonucleotide
gaagcuugaggagcgagga

SEQ ID NO: 115 - RNA, 19 nt, Artificial Sequence
  Description of Artificial Sequence: Synthetic oligonucleotide
aagcuugaggagcgaggau

SEQ ID NO: 116 - RNA, 19 nt, Artificial Sequence
  Description of Artificial Sequence: Synthetic oligonucleotide
agcuugaggagcgaggaug

SEQ ID NO: 117 - RNA, 19 nt, Artificial Sequence
  Description of Artificial Sequence: Synthetic oligonucleotide
gcuugaggagcgaggaugg

SEQ ID NO: 118 - RNA, 19 nt, Artificial Sequence
  Description of Artificial Sequence: Synthetic oligonucleotide
cuugaggagcgaggauggc

SEQ ID NO: 119 - RNA, 19 nt, Artificial Sequence
  Description of Artificial Sequence: Synthetic oligonucleotide
uugaggagcgaggauggca

SEQ ID NO: 120 - RNA, 19 nt, Artificial Sequence
  Description of Artificial Sequence: Synthetic oligonucleotide
ugaggagcgaggauggcag

SEQ ID NO: 121 - RNA, 19 nt, Artificial Sequence
  Description of Artificial Sequence: Synthetic oligonucleotide
gaggagcgaggauggcagu

SEQ ID NO: 122 - RNA, 19 nt, Artificial Sequence
  Description of Artificial Sequence: Synthetic oligonucleotide
aggagcgaggauggcaguc

SEQ ID NO: 123 - RNA, 19 nt, Artificial Sequence
  Description of Artificial Sequence: Synthetic oligonucleotide
ggagcgaggauggcaguca

SEQ ID NO: 124 - RNA, 19 nt, Artificial Sequence
  Description of Artificial Sequence: Synthetic oligonucleotide
gagcgaggauggcagucaa

SEQ ID NO: 125 - RNA, 19 nt, Artificial Sequence
  Description of Artificial Sequence: Synthetic oligonucleotide
agcgaggauggcagucaac

SEQ ID NO: 126 - RNA, 19 nt, Artificial Sequence
  Description of Artificial Sequence: Synthetic oligonucleotide
gcgaggauggcagucaaca

SEQ ID NO: 127 - RNA, 19 nt, Artificial Sequence
  Description of Artificial Sequence: Synthetic oligonucleotide
cgaggauggcagucaacaa

SEQ ID NO: 128 - RNA, 19 nt, Artificial Sequence
  Description of Artificial Sequence: Synthetic oligonucleotide
gaggauggcagucaacaaa

SEQ ID NO: 129 - RNA, 19 nt, Artificial Sequence
  Description of Artificial Sequence: Synthetic oligonucleotide
aggauggcagucaacaaag

SEQ ID NO: 130 - RNA, 19 nt, Artificial Sequence
  Description of Artificial Sequence: Synthetic oligonucleotide
ggauggcagucaacaaagg

SEQ ID NO: 131 - RNA, 19 nt, Artificial Sequence
  Description of Artificial Sequence: Synthetic oligonucleotide
gauggcagucaacaaaggc

SEQ ID NO: 132 - RNA, 19 nt, Artificial Sequence
  Description of Artificial Sequence: Synthetic oligonucleotide
auggcagucaacaaaggcc

SEQ ID NO: 133 - RNA, 19 nt, Artificial Sequence
  Description of Artificial Sequence: Synthetic oligonucleotide
uggcagucaacaaaggccu

SEQ ID NO: 134 - RNA, 19 nt, Artificial Sequence
  Description of Artificial Sequence: Synthetic oligonucleotide
ggcagucaacaaaggccuc

SEQ ID NO: 135 - RNA, 19 nt, Artificial Sequence
  Description of Artificial Sequence: Synthetic oligonucleotide
gcagucaacaaaggccuca

SEQ ID NO: 136 - RNA, 19 nt, Artificial Sequence
  Description of Artificial Sequence: Synthetic oligonucleotide
cagucaacaaaggccucac

SEQ ID NO: 137 - RNA, 19 nt, Artificial Sequence
  Description of Artificial Sequence: Synthetic oligonucleotide
agucaacaaaggccucacc

SEQ ID NO: 138 - RNA, 19 nt, Artificial Sequence
  Description of Artificial Sequence: Synthetic oligonucleotide
gucaacaaaggccucaccu

SEQ ID NO: 139 - RNA, 19 nt, Artificial Sequence
  Description of Artificial Sequence: Synthetic oligonucleotide
ucaacaaaggccucaccuu

SEQ ID NO: 140 - RNA, 19 nt, Artificial Sequence
  Description of Artificial Sequence: Synthetic oligonucleotide
caacaaaggccucaccuug

SEQ ID NO: 141 - RNA, 19 nt, Artificial Sequence
  Description of Artificial Sequence: Synthetic oligonucleotide
aacaaaggccucaccuugc

SEQ ID NO: 142 - RNA, 19 nt, Artificial Sequence
  Description of Artificial Sequence: Synthetic oligonucleotide
acaaaggccucaccuugcu

SEQ ID NO: 143 - RNA, 19 nt, Artificial Sequence
  Description of Artificial Sequence: Synthetic oligonucleotide
caaaggccucaccuugcug

SEQ ID NO: 144 - RNA, 19 nt, Artificial Sequence
  Description of Artificial Sequence: Synthetic oligonucleotide
aaaggccucaccuugcugg

SEQ ID NO: 145 - RNA, 19 nt, Artificial Sequence
  Description of Artificial Sequence: Synthetic oligonucleotide
aaggccucaccuugcugga

SEQ ID NO: 146 - RNA, 19 nt, Artificial Sequence
  Description of Artificial Sequence: Synthetic oligonucleotide
aggccucaccuugcuggau

SEQ ID NO: 147 - RNA, 19 nt, Artificial Sequence
  Description of Artificial Sequence: Synthetic oligonucleotide
ggccucaccuugcuggaug

SEQ ID NO: 148 - RNA, 19 nt, Artificial Sequence
  Description of Artificial Sequence: Synthetic oligonucleotide
gccucaccuugcuggaugg

SEQ ID NO: 149 - RNA, 19 nt, Artificial Sequence
  Description of Artificial Sequence: Synthetic oligonucleotide
ccucaccuugcuggaugga

SEQ ID NO: 150 - RNA, 19 nt, Artificial Sequence
  Description of Artificial Sequence: Synthetic oligonucleotide
cucaccuugcuggauggag

SEQ ID NO: 151 - RNA, 19 nt, Artificial Sequence
  Description of Artificial Sequence: Synthetic oligonucleotide
ucaccuugcuggauggaga

SEQ ID NO: 152 - RNA, 19 nt, Artificial Sequence
  Description of Artificial Sequence: Synthetic oligonucleotide
caccuugcuggauggagac

SEQ ID NO: 153 - RNA, 19 nt, Artificial Sequence
  Description of Artificial Sequence: Synthetic oligonucleotide
accuugcuggauggagacc

SEQ ID NO: 154 - RNA, 19 nt, Artificial Sequence
  Description of Artificial Sequence: Synthetic oligonucleotide
ccuugcuggauggagaccu

SEQ ID NO: 155 - RNA, 19 nt, Artificial Sequence
  Description of Artificial Sequence: Synthetic oligonucleotide
cuugcuggauggagaccuc

SEQ ID NO: 156 - RNA, 19 nt, Artificial Sequence
  Description of Artificial Sequence: Synthetic oligonucleotide
uugcuggauggagaccucc

SEQ ID NO: 157 - RNA, 19 nt, Artificial Sequence
  Description of Artificial Sequence: Synthetic oligonucleotide
ugcuggauggagaccuccc

SEQ ID NO: 158 - RNA, 19 nt, Artificial Sequence
  Description of Artificial Sequence: Synthetic oligonucleotide
gcuggauggagaccucccu

SEQ ID NO: 159 - RNA, 19 nt, Artificial Sequence
  Description of Artificial Sequence: Synthetic oligonucleotide
cuggauggagaccucccug

SEQ ID NO: 160 - RNA, 19 nt, Artificial Sequence
  Description of Artificial Sequence: Synthetic oligonucleotide
uggauggagaccucccuga

SEQ ID NO: 161 - RNA, 19 nt, Artificial Sequence
  Description of Artificial Sequence: Synthetic oligonucleotide
ggauggagaccucccugag

SEQ ID NO: 162 - RNA, 19 nt, Artificial Sequence
  Description of Artificial Sequence: Synthetic oligonucleotide
gauggagaccucccugagc

SEQ ID NO: 163 - RNA, 19 nt, Artificial Sequence
  Description of Artificial Sequence: Synthetic oligonucleotide
auggagaccucccugagca

SEQ ID NO: 164 - RNA, 19 nt, Artificial Sequence
  Description of Artificial Sequence: Synthetic oligonucleotide
uggagaccucccugagcag

SEQ ID NO: 165 - RNA, 19 nt, Artificial Sequence
  Description of Artificial Sequence: Synthetic oligonucleotide
ggagaccucccugagcagg

SEQ ID NO: 166 - RNA, 19 nt, Artificial Sequence
  Description of Artificial Sequence: Synthetic oligonucleotide
gagaccucccugagcagga

SEQ ID NO: 167 - RNA, 19 nt, Artificial Sequence
  Description of Artificial Sequence: Synthetic oligonucleotide
agaccucccugagcaggag

SEQ ID NO: 168 - RNA, 19 nt, Artificial Sequence
  Description of Artificial Sequence: Synthetic oligonucleotide
gaccucccugagcaggaga

SEQ ID NO: 169 - RNA, 19 nt, Artificial Sequence
  Description of Artificial Sequence: Synthetic oligonucleotide
accucccugagcaggagaa

SEQ ID NO: 170 - RNA, 19 nt, Artificial Sequence
  Description of Artificial Sequence: Synthetic oligonucleotide
ccucccugagcaggagaau

SEQ ID NO: 171 - RNA, 19 nt, Artificial Sequence
  Description of Artificial Sequence: Synthetic oligonucleotide
cucccugagcaggagaaug

SEQ ID NO: 172 - RNA, 19 nt, Artificial Sequence
  Description of Artificial Sequence: Synthetic oligonucleotide
ucccugagcaggagaaugu

SEQ ID NO: 173 - RNA, 19 nt, Artificial Sequence
  Description of Artificial Sequence: Synthetic oligonucleotide
cccugagcaggagaaugug

SEQ ID NO: 174 - RNA, 19 nt, Artificial Sequence
  Description of Artificial Sequence: Synthetic oligonucleotide
ccugagcaggagaaugugc

SEQ ID NO: 175 - RNA, 19 nt, Artificial Sequence
  Description of Artificial Sequence: Synthetic oligonucleotide
cugagcaggagaaugugcu

SEQ ID NO: 176 - RNA, 19 nt, Artificial Sequence
  Description of Artificial Sequence: Synthetic oligonucleotide
ugagcaggagaaugugcug

SEQ ID NO: 177 - RNA, 19 nt, Artificial Sequence
  Description of Artificial Sequence: Synthetic oligonucleotide
gagcaggagaaugugcugc

SEQ ID NO: 178 - RNA, 19 nt, Artificial Sequence
  Description of Artificial Sequence: Synthetic oligonucleotide
agcaggagaaugugcugca

SEQ ID NO: 179 - RNA, 19 nt, Artificial Sequence
  Description of Artificial Sequence: Synthetic oligonucleotide
gcaggagaaugugcugcag

SEQ ID NO: 180 - RNA, 19 nt, Artificial Sequence
  Description of Artificial Sequence: Synthetic oligonucleotide
caggagaaugugcugcagc

SEQ ID NO: 181 - RNA, 19 nt, Artificial Sequence
  Description of Artificial Sequence: Synthetic oligonucleotide
aggagaaugugcugcagcg

SEQ ID NO: 182 - RNA, 19 nt, Artificial Sequence
  Description of Artificial Sequence: Synthetic oligonucleotide
ggagaaugugcugcagcgg

SEQ ID NO: 183 - RNA, 19 nt, Artificial Sequence
  Description of Artificial Sequence: Synthetic oligonucleotide
gagaaugugcugcagcggg

SEQ ID NO: 184 - RNA, 19 nt, Artificial Sequence
  Description of Artificial Sequence: Synthetic oligonucleotide
agaaugugcugcagcgggu

SEQ ID NO: 185 - RNA, 19 nt, Artificial Sequence
  Description of Artificial Sequence: Synthetic oligonucleotide
gaaugugcugcagcggguc

SEQ ID NO: 186 - RNA, 19 nt, Artificial Sequence
  Description of Artificial Sequence: Synthetic oligonucleotide
aaugugcugcagcgggucc

SEQ ID NO: 187 - RNA, 19 nt, Artificial Sequence
  Description of Artificial Sequence: Synthetic oligonucleotide
augugcugcagcggguccu

SEQ ID NO: 188 - RNA, 19 nt, Artificial Sequence
  Description of Artificial Sequence: Synthetic oligonucleotide
ugugcugcagcggguccug

SEQ ID NO: 189 - RNA, 19 nt, Artificial Sequence
  Description of Artificial Sequence: Synthetic oligonucleotide
gugcugcagcggguccugc

SEQ ID NO: 190 - RNA, 19 nt, Artificial Sequence
  Description of Artificial Sequence: Synthetic oligonucleotide
ugcugcagcggguccugca

SEQ ID NO: 191 - RNA, 19 nt, Artificial Sequence
  Description of Artificial Sequence: Synthetic oligonucleotide
gcugcagcggguccugcag

SEQ ID NO: 192 - RNA, 19 nt, Artificial Sequence
  Description of Artificial Sequence: Synthetic oligonucleotide
cugcagcggguccugcagc

SEQ ID NO: 193 - RNA, 19 nt, Artificial Sequence
  Description of Artificial Sequence: Synthetic oligonucleotide
ugcagcggguccugcagcu

SEQ ID NO: 194 - RNA, 19 nt, Artificial Sequence
  Description of Artificial Sequence: Synthetic oligonucleotide
gcagcggguccugcagcug

SEQ ID NO: 195 - RNA, 19 nt, Artificial Sequence
  Description of Artificial Sequence: Synthetic oligonucleotide
cagcggguccugcagcugc

SEQ ID NO: 196 - RNA, 19 nt, Artificial Sequence
  Description of Artificial Sequence: Synthetic oligonucleotide
agcggguccugcagcugcc

SEQ ID NO: 197 - RNA, 19 nt, Artificial Sequence
  Description of Artificial Sequence: Synthetic oligonucleotide
gcggguccugcagcugccg

SEQ ID NO: 198 - RNA, 19 nt, Artificial Sequence
  Description of Artificial Sequence: Synthetic oligonucleotide
cggguccugcagcugccgg

SEQ ID NO: 199 - RNA, 19 nt, Artificial Sequence
  Description of Artificial Sequence: Synthetic oligonucleotide
ggguccugcagcugccggu

SEQ ID NO: 200 - RNA, 19 nt, Artificial Sequence
  Description of Artificial Sequence: Synthetic oligonucleotide
gguccugcagcugccggug

SEQ ID NO: 201 - RNA, 19 nt, Artificial Sequence
  Description of Artificial Sequence: Synthetic oligonucleotide
guccugcagcugccggugg

SEQ ID NO: 202 - RNA, 19 nt, Artificial Sequence
  Description of Artificial Sequence: Synthetic oligonucleotide
uccugcagcugccgguggu

SEQ ID NO: 203 - RNA, 19 nt, Artificial Sequence
  Description of Artificial Sequence: Synthetic oligonucleotide
ccugcagcugccgguggug

SEQ ID NO: 204 - RNA, 19 nt, Artificial Sequence
  Description of Artificial Sequence: Synthetic oligonucleotide
cugcagcugccggugguga

SEQ ID NO: 205 - RNA, 19 nt, Artificial Sequence
  Description of Artificial Sequence: Synthetic oligonucleotide
ugcagcugccgguggugag

SEQ ID NO: 206 - RNA, 19 nt, Artificial Sequence
  Description of Artificial Sequence: Synthetic oligonucleotide
gcagcugccgguggugagu

SEQ ID NO: 207 - RNA, 19 nt, Artificial Sequence
  Description of Artificial Sequence: Synthetic oligonucleotide
cagcugccgguggugagug

SEQ ID NO: 208 - RNA, 19 nt, Artificial Sequence
  Description of Artificial Sequence: Synthetic oligonucleotide
agcugccgguggugagugg

SEQ ID NO: 209 - RNA, 19 nt, Artificial Sequence
  Description of Artificial Sequence: Synthetic oligonucleotide
gcugccgguggugaguggc

SEQ ID NO: 210 - RNA, 19 nt, Artificial Sequence
  Description of Artificial Sequence: Synthetic oligonucleotide
cugccgguggugaguggca

SEQ ID NO: 211 - RNA, 19 nt, Artificial Sequence
  Description of Artificial Sequence: Synthetic oligonucleotide
ugccgguggugaguggcac

SEQ ID NO: 212 - RNA, 19 nt, Artificial Sequence
  Description of Artificial Sequence: Synthetic oligonucleotide
gccgguggugaguggcacc

SEQ ID NO: 213 - RNA, 19 nt, Artificial Sequence
  Description of Artificial Sequence: Synthetic oligonucleotide
ccgguggugaguggcaccu

SEQ ID NO: 214 - RNA, 19 nt, Artificial Sequence
  Description of Artificial Sequence: Synthetic oligonucleotide
cgguggugaguggcaccug

SEQ ID NO: 215 - RNA, 19 nt, Artificial Sequence
  Description of Artificial Sequence: Synthetic oligonucleotide
gguggugaguggcaccugc

SEQ ID NO: 216 - RNA, 19 nt, Artificial Sequence
  Description of Artificial Sequence: Synthetic oligonucleotide
guggugaguggcaccugcg

SEQ ID NO: 217 - RNA, 19 nt, Artificial Sequence
  Description of Artificial Sequence: Synthetic oligonucleotide
uggugaguggcaccugcga

SEQ ID NO: 218 - RNA, 19 nt, Artificial Sequence
  Description of Artificial Sequence: Synthetic oligonucleotide
ggugaguggcaccugcgaa

SEQ ID NO: 219 - RNA, 19 nt, Artificial Sequence
  Description of Artificial Sequence: Synthetic oligonucleotide
gugaguggcaccugcgaau

SEQ ID NO: 220 - RNA, 19 nt, Artificial Sequence
  Description of Artificial Sequence: Synthetic oligonucleotide
ugaguggcaccugcgaaug

SEQ ID NO: 221 - RNA, 19 nt, Artificial Sequence
  Description of Artificial Sequence: Synthetic oligonucleotide
gaguggcaccugcgaaugc

SEQ ID NO: 222 - RNA, 19 nt, Artificial Sequence
  Description of Artificial Sequence: Synthetic oligonucleotide
aguggcaccugcgaaugcu

SEQ ID NO: 223 - RNA, 19 nt, Artificial Sequence
  Description of Artificial Sequence: Synthetic oligonucleotide
guggcaccugcgaaugcuu

SEQ ID NO: 224 - RNA, 19 nt, Artificial Sequence
  Description of Artificial Sequence: Synthetic oligonucleotide
uggcaccugcgaaugcuuc

SEQ ID NO: 225 - RNA, 19 nt, Artificial Sequence
  Description of Artificial Sequence: Synthetic oligonucleotide
ggcaccugcgaaugcuucc

SEQ ID NO: 226 - RNA, 19 nt, Artificial Sequence
  Description of Artificial Sequence: Synthetic oligonucleotide
gcaccugcgaaugcuucca

SEQ ID NO: 227 - RNA, 19 nt, Artificial Sequence
  Description of Artificial Sequence: Synthetic oligonucleotide
caccugcgaaugcuuccag

SEQ ID NO: 228 - RNA, 19 nt, Artificial Sequence
  Description of Artificial Sequence: Synthetic oligonucleotide
accugcgaaugcuuccaga

SEQ ID NO: 229 - RNA, 19 nt, Artificial Sequence
  Description of Artificial Sequence: Synthetic oligonucleotide
ccugcgaaugcuuccagaa

SEQ ID NO: 230 - RNA, 19 nt, Artificial Sequence
  Description of Artificial Sequence: Synthetic oligonucleotide
cugcgaaugcuuccagaag

SEQ ID NO: 231 - RNA, 19 nt, Artificial Sequence
  Description of Artificial Sequence: Synthetic oligonucleotide
ugcgaaugcuuccagaaga

SEQ ID NO: 232 - RNA, 19 nt, Artificial Sequence
  Description of Artificial Sequence: Synthetic oligonucleotide
gcgaaugcuuccagaagac

SEQ ID NO: 233 - RNA, 19 nt, Artificial Sequence
  Description of Artificial Sequence: Synthetic oligonucleotide
cgaaugcuuccagaagacc

SEQ ID NO: 234 - RNA, 19 nt, Artificial Sequence
  Description of Artificial Sequence: Synthetic oligonucleotide
gaaugcuuccagaagaccu

SEQ ID NO: 235 - RNA, 19 nt, Artificial Sequence
  Description of Artificial Sequence: Synthetic oligonucleotide
aaugcuuccagaagaccua

SEQ ID NO: 236 - RNA, 19 nt, Artificial Sequence
  Description of Artificial Sequence: Synthetic oligonucleotide
augcuuccagaagaccuac

SEQ ID NO: 237 - RNA, 19 nt, Artificial Sequence
  Description of Artificial Sequence: Synthetic oligonucleotide
ugcuuccagaagaccuaca

SEQ ID NO: 238 - RNA, 19 nt, Artificial Sequence
  Description of Artificial Sequence: Synthetic oligonucleotide
gcuuccagaagaccuacac

SEQ ID NO: 239 - RNA, 19 nt, Artificial Sequence
  Description of Artificial Sequence: Synthetic oligonucleotide
cuuccagaagaccuacacc

SEQ ID NO: 240 - RNA, 19 nt, Artificial Sequence
  Description of Artificial Sequence: Synthetic oligonucleotide
uuccagaagaccuacacca

SEQ ID NO: 241 - RNA, 19 nt, Artificial Sequence
  Description of Artificial Sequence: Synthetic oligonucleotide
uccagaagaccuacaccag

SEQ ID NO: 242 - RNA, 19 nt, Artificial Sequence
  Description of Artificial Sequence: Synthetic oligonucleotide
ccagaagaccuacaccagc

SEQ ID NO: 243 - RNA, 19 nt, Artificial Sequence
  Description of Artificial Sequence: Synthetic oligonucleotide
cagaagaccuacaccagca

SEQ ID NO: 244 - RNA, 19 nt, Artificial Sequence
  Description of Artificial Sequence: Synthetic oligonucleotide
agaagaccuacaccagcac

SEQ ID NO: 245 - RNA, 19 nt, Artificial Sequence
  Description of Artificial Sequence: Synthetic oligonucleotide
gaagaccuacaccagcacu

SEQ ID NO: 246 - RNA, 19 nt, Artificial Sequence
  Description of Artificial Sequence: Synthetic oligonucleotide
aagaccuacaccagcacua

SEQ ID NO: 247 - RNA, 19 nt, Artificial Sequence
  Description of Artificial Sequence: Synthetic oligonucleotide
agaccuacaccagcacuaa

SEQ ID NO: 248 - RNA, 19 nt, Artificial Sequence
  Description of Artificial Sequence: Synthetic oligonucleotide
gaccuacaccagcacuaag

SEQ ID NO: 249 - RNA, 19 nt, Artificial Sequence
  Description of Artificial Sequence: Synthetic oligonucleotide
accuacaccagcacuaagg

SEQ ID NO: 250 - RNA, 19 nt, Artificial Sequence
  Description of Artificial Sequence: Synthetic oligonucleotide
ccuacaccagcacuaagga

SEQ ID NO: 251 - RNA, 19 nt, Artificial Sequence
  Description of Artificial Sequence: Synthetic oligonucleotide
cuacaccagcacuaaggaa

SEQ ID NO: 252 - RNA, 19 nt, Artificial Sequence
  Description of Artificial Sequence: Synthetic oligonucleotide
uacaccagcacuaaggaag

SEQ ID NO: 253 - RNA, 19 nt, Artificial Sequence
  Description of Artificial Sequence: Synthetic oligonucleotide
acaccagcacuaaggaagc

SEQ ID NO: 254 - RNA, 19 nt, Artificial Sequence
  Description of Artificial Sequence: Synthetic oligonucleotide
caccagcacuaaggaagcc

SEQ ID NO: 255 - RNA, 19 nt, Artificial Sequence
  Description of Artificial Sequence: Synthetic oligonucleotide
accagcacuaaggaagccc

SEQ ID NO: 256 - RNA, 19 nt, Artificial Sequence
  Description of Artificial Sequence: Synthetic oligonucleotide
ccagcacuaaggaagccca

SEQ ID NO: 257 - RNA, 19 nt, Artificial Sequence
  Description of Artificial Sequence: Synthetic oligonucleotide
cagcacuaaggaagcccac

SEQ ID NO: 258 - RNA, 19 nt, Artificial Sequence
  Description of Artificial Sequence: Synthetic oligonucleotide
agcacuaaggaagcccacc

SEQ ID NO: 259 - RNA, 19 nt, Artificial Sequence
  Description of Artificial Sequence: Synthetic oligonucleotide
gcacuaaggaagcccaccc

SEQ ID NO: 260 - RNA, 19 nt, Artificial Sequence
  Description of Artificial Sequence: Synthetic oligonucleotide
cacuaaggaagcccacccc

SEQ ID NO: 261 - RNA, 19 nt, Artificial Sequence
  Description of Artificial Sequence: Synthetic oligonucleotide
acuaaggaagcccaccccc

SEQ ID NO: 262 - RNA, 19 nt, Artificial Sequence
  Description of Artificial Sequence: Synthetic oligonucleotide
cuaaggaagcccacccccu

SEQ ID NO: 263 - RNA, 19 nt, Artificial Sequence
  Description of Artificial Sequence: Synthetic oligonucleotide
uaaggaagcccacccccug

SEQ ID NO: 264 - RNA, 19 nt, Artificial Sequence
  Description of Artificial Sequence: Synthetic oligonucleotide
aaggaagcccacccccugg

SEQ ID NO: 265 - RNA, 19 nt, Artificial Sequence
  Description of Artificial Sequence: Synthetic oligonucleotide
aggaagcccacccccuggu

SEQ ID NO: 266 - RNA, 19 nt, Artificial Sequence
  Description of Artificial Sequence: Synthetic oligonucleotide
ggaagcccacccccuggug

SEQ ID NO: 267 - RNA, 19 nt, Artificial Sequence
  Description of Artificial Sequence: Synthetic oligonucleotide
gaagcccacccccuggugg

SEQ ID NO: 268 - RNA, 19 nt, Artificial Sequence
  Description of Artificial Sequence: Synthetic oligonucleotide
aagcccacccccugguggc

SEQ ID NO: 269 - RNA, 19 nt, Artificial Sequence
  Description of Artificial Sequence: Synthetic oligonucleotide
agcccacccccugguggcc

SEQ ID NO: 270 - RNA, 19 nt, Artificial Sequence
  Description of Artificial Sequence: Synthetic oligonucleotide
gcccacccccugguggccu

SEQ ID NO: 271 - RNA, 19 nt, Artificial Sequence
  Description of Artificial Sequence: Synthetic oligonucleotide
cccacccccugguggccuc

SEQ ID NO: 272 - RNA, 19 nt, Artificial Sequence
  Description of Artificial Sequence: Synthetic oligonucleotide
ccacccccugguggccucu

SEQ ID NO: 273 - RNA, 19 nt, Artificial Sequence
  Description of Artificial Sequence: Synthetic oligonucleotide
cacccccugguggccucug

SEQ ID NO: 274 - RNA, 19 nt, Artificial Sequence
  Description of Artificial Sequence: Synthetic oligonucleotide
acccccugguggccucugu

SEQ ID NO: 275 - RNA, 19 nt, Artificial Sequence
  Description of Artificial Sequence: Synthetic oligonucleotide
cccccugguggccucugug

SEQ ID NO: 276 - RNA, 19 nt, Artificial Sequence
  Description of Artificial Sequence: Synthetic oligonucleotide
ccccugguggccucugugu

SEQ ID NO: 277 - RNA, 19 nt, Artificial Sequence
  Description of Artificial Sequence: Synthetic oligonucleotide
cccugguggccucugugug

SEQ ID NO: 278 - RNA, 19 nt, Artificial Sequence
  Description of Artificial Sequence: Synthetic oligonucleotide
ccugguggccucugugugc

SEQ ID NO: 279 - RNA, 19 nt, Artificial Sequence
  Description of Artificial Sequence: Synthetic oligonucleotide
cugguggccucugugugca

SEQ ID NO: 280 - RNA, 19 nt, Artificial Sequence
  Description of Artificial Sequence: Synthetic oligonucleotide
ugguggccucugugugcaa

SEQ ID NO: 281 - RNA, 19 nt, Artificial Sequence
  Description of Artificial Sequence: Synthetic oligonucleotide
gguggccucugugugcaau

SEQ ID NO: 282 - RNA, 19 nt, Artificial Sequence
  Description of Artificial Sequence: Synthetic oligonucleotide
guggccucugugugcaaug

SEQ ID NO: 283 - RNA, 19 nt, Artificial Sequence
  Description of Artificial Sequence: Synthetic oligonucleotide
uggccucugugugcaaugc

SEQ ID NO: 284 - RNA, 19 nt, Artificial Sequence
  Description of Artificial Sequence: Synthetic oligonucleotide
ggccucugugugcaaugcc

SEQ ID NO: 285 - RNA, 19 nt, Artificial Sequence
  Description of Artificial Sequence: Synthetic oligonucleotide
gccucugugugcaaugccu

SEQ ID NO: 286 - RNA, 19 nt, Artificial Sequence
  Description of Artificial Sequence: Synthetic oligonucleotide
ccucugugugcaaugccua

SEQ ID NO: 287 - RNA, 19 nt, Artificial Sequence
  Description of Artificial Sequence: Synthetic oligonucleotide
cucugugugcaaugccuau

SEQ ID NO: 288 - RNA, 19 nt, Artificial Sequence
  Description of Artificial Sequence: Synthetic oligonucleotide
ucugugugcaaugccuaug

SEQ ID NO: 289 - RNA, 19 nt, Artificial Sequence
  Description of Artificial Sequence: Synthetic oligonucleotide
cugugugcaaugccuauga

SEQ ID NO: 290 - RNA, 19 nt, Artificial Sequence
  Description of Artificial Sequence: Synthetic oligonucleotide
ugugugcaaugccuaugag

SEQ ID NO: 291 - RNA, 19 nt, Artificial Sequence
  Description of Artificial Sequence: Synthetic oligonucleotide
gugugcaaugccuaugaga

SEQ ID NO: 292 - RNA, 19 nt, Artificial Sequence
  Description of Artificial Sequence: Synthetic oligonucleotide
ugugcaaugccuaugagaa

SEQ ID NO: 293 - RNA, 19 nt, Artificial Sequence
  Description of Artificial Sequence: Synthetic oligonucleotide
gugcaaugccuaugagaag

SEQ ID NO: 294 - RNA, 19 nt, Artificial Sequence
  Description of Artificial Sequence: Synthetic oligonucleotide
ugcaaugccuaugagaagg

SEQ ID NO: 295 - RNA, 19 nt, Artificial Sequence
  Description of Artificial Sequence: Synthetic oligonucleotide
gcaaugccuaugagaaggg

SEQ ID NO: 296 - RNA, 19 nt, Artificial Sequence
  Description of Artificial Sequence: Synthetic oligonucleotide
caaugccuaugagaagggc

SEQ ID NO: 297 - RNA, 19 nt, Artificial Sequence
  Description of Artificial Sequence: Synthetic oligonucleotide
aaugccuaugagaagggcg

SEQ ID NO: 298 - RNA, 19 nt, Artificial Sequence
  Description of Artificial Sequence: Synthetic oligonucleotide
augccuaugagaagggcgu

SEQ ID NO: 299 - RNA, 19 nt, Artificial Sequence
  Description of Artificial Sequence: Synthetic oligonucleotide
ugccuaugagaagggcgug

SEQ ID NO: 300 - RNA, 19 nt, Artificial Sequence
  Description of Artificial Sequence: Synthetic oligonucleotide
gccuaugagaagggcgugc

SEQ ID NO: 301 - RNA, 19 nt, Artificial Sequence
  Description of Artificial Sequence: Synthetic oligonucleotide
ccuaugagaagggcgugca

SEQ ID NO: 302 - RNA, 19 nt, Artificial Sequence
  Description of Artificial Sequence: Synthetic oligonucleotide
cuaugagaagggcgugcag

SEQ ID NO: 303 - RNA, 19 nt, Artificial Sequence
  Description of Artificial Sequence: Synthetic oligonucleotide
uaugagaagggcgugcaga

SEQ ID NO: 304 - RNA, 19 nt, Artificial Sequence
  Description of Artificial Sequence: Synthetic oligonucleotide
augagaagggcgugcagag

SEQ ID NO: 305 - RNA, 19 nt, Artificial Sequence
  Description of Artificial Sequence: Synthetic oligonucleotide
ugagaagggcgugcagagc

SEQ ID NO: 306 - RNA, 19 nt, Artificial Sequence
  Description of Artificial Sequence: Synthetic oligonucleotide
gagaagggcgugcagagcg

SEQ ID NO: 307 - RNA, 19 nt, Artificial Sequence
  Description of Artificial Sequence: Synthetic oligonucleotide
agaagggcgugcagagcgc

SEQ ID NO: 308 - RNA, 19 nt, Artificial Sequence
  Description of Artificial Sequence: Synthetic oligonucleotide
gaagggcgugcagagcgcc

SEQ ID NO: 309 - RNA, 19 nt, Artificial Sequence
  Description of Artificial Sequence: Synthetic oligonucleotide
aagggcgugcagagcgcca

SEQ ID NO: 310 - RNA, 19 nt, Artificial Sequence
  Description of Artificial Sequence: Synthetic oligonucleotide
agggcgugcagagcgccag

SEQ ID NO: 311 - RNA, 19 nt, Artificial Sequence
  Description of Artificial Sequence: Synthetic oligonucleotide
gggcgugcagagcgccagu

SEQ ID NO: 312 - RNA, 19 nt, Artificial Sequence
  Description of Artificial Sequence: Synthetic oligonucleotide
ggcgugcagagcgccagua

SEQ ID NO: 313 - RNA, 19 nt, Artificial Sequence
  Description of Artificial Sequence: Synthetic oligonucleotide
gcgugcagagcgccaguag

SEQ ID NO: 314 - RNA, 19 nt, Artificial Sequence
  Description of Artificial Sequence: Synthetic oligonucleotide
cgugcagagcgccaguagc

SEQ ID NO: 315 - RNA, 19 nt, Artificial Sequence
  Description of Artificial Sequence: Synthetic oligonucleotide
gugcagagcgccaguagcu

SEQ ID NO: 316 - RNA, 19 nt, Artificial Sequence
  Description of Artificial Sequence: Synthetic oligonucleotide
ugcagagcgccaguagcuu

SEQ ID NO: 317 - RNA, 19 nt, Artificial Sequence
  Description of Artificial Sequence: Synthetic oligonucleotide
gcagagcgccaguagcuug

SEQ ID NO: 318 - RNA, 19 nt, Artificial Sequence
  Description of Artificial Sequence: Synthetic oligonucleotide
cagagcgccaguagcuugg

SEQ ID NO: 319 - RNA, 19 nt, Artificial Sequence
  Description of Artificial Sequence: Synthetic oligonucleotide
agagcgccaguagcuuggc

SEQ ID NO: 320 - RNA, 19 nt, Artificial Sequence
  Description of Artificial Sequence: Synthetic oligonucleotide
gagcgccaguagcuuggcu

SEQ ID NO: 321 - RNA, 19 nt, Artificial Sequence
  Description of Artificial Sequence: Synthetic oligonucleotide
agcgccaguagcuuggcug

SEQ ID NO: 322 - RNA, 19 nt, Artificial Sequence
  Description of Artificial Sequence: Synthetic oligonucleotide
gcgccaguagcuuggcugc

SEQ ID NO: 323 - RNA, 19 nt, Artificial Sequence
  Description of Artificial Sequence: Synthetic oligonucleotide
cgccaguagcuuggcugcc

SEQ ID NO: 324 - RNA, 19 nt, Artificial Sequence
  Description of Artificial Sequence: Synthetic oligonucleotide
gccaguagcuuggcugccu

SEQ ID NO: 325 - RNA, 19 nt, Artificial Sequence
  Description of Artificial Sequence: Synthetic oligonucleotide
ccaguagcuuggcugccug

SEQ ID NO: 326 - RNA, 19 nt, Artificial Sequence
  Description of Artificial Sequence: Synthetic oligonucleotide
caguagcuuggcugccugg

SEQ ID NO: 327 - RNA, 19 nt, Artificial Sequence
  Description of Artificial Sequence: Synthetic oligonucleotide
aguagcuuggcugccugga

SEQ ID NO: 328 - RNA, 19 nt, Artificial Sequence
  Description of Artificial Sequence: Synthetic oligonucleotide
guagcuuggcugccuggag

SEQ ID NO: 329 - RNA, 19 nt, Artificial Sequence
  Description of Artificial Sequence: Synthetic oligonucleotide
uagcuuggcugccuggagc

SEQ ID NO: 330 - RNA, 19 nt, Artificial Sequence
  Description of Artificial Sequence: Synthetic oligonucleotide
agcuuggcugccuggagca

SEQ ID NO: 331 - RNA, 19 nt, Artificial Sequence
  Description of Artificial Sequence: Synthetic oligonucleotide
gcuuggcugccuggagcau

SEQ ID NO: 332 - RNA, 19 nt, Artificial Sequence
  Description of Artificial Sequence: Synthetic oligonucleotide
cuuggcugccuggagcaug

SEQ ID NO: 333 - RNA, 19 nt, Artificial Sequence
  Description of Artificial Sequence: Synthetic oligonucleotide
uuggcugccuggagcaugg

SEQ ID NO: 334 - RNA, 19 nt, Artificial Sequence
  Description of Artificial Sequence: Synthetic oligonucleotide
uggcugccuggagcaugga

SEQ ID NO: 335 - RNA, 19 nt, Artificial Sequence
  Description of Artificial Sequence: Synthetic oligonucleotide
ggcugccuggagcauggag

SEQ ID NO: 336 - RNA, 19 nt, Artificial Sequence
  Description of Artificial Sequence: Synthetic oligonucleotide
gcugccuggagcauggagc

SEQ ID NO: 337 - RNA, 19 nt, Artificial Sequence
  Description of Artificial Sequence: Synthetic oligonucleotide
cugccuggagcauggagcc

SEQ ID NO: 338 - RNA, 19 nt, Artificial Sequence
  Description of Artificial Sequence: Synthetic oligonucleotide
ugccuggagcauggagccg

SEQ ID NO: 339 - RNA, 19 nt, Artificial Sequence
  Description of Artificial Sequence: Synthetic oligonucleotide
gccuggagcauggagccgg

SEQ ID NO: 340 - RNA, 19 nt, Artificial Sequence
  Description of Artificial Sequence: Synthetic oligonucleotide
ccuggagcauggagccggu

SEQ ID NO: 341 - RNA, 19 nt, Artificial Sequence
  Description of Artificial Sequence: Synthetic oligonucleotide
cuggagcauggagccggug

SEQ ID NO: 342 - RNA, 19 nt, Artificial Sequence
  Description of Artificial Sequence: Synthetic oligonucleotide
uggagcauggagccggugg

SEQ ID NO: 343 - RNA, 19 nt, Artificial Sequence
  Description of Artificial Sequence: Synthetic oligonucleotide
ggagcauggagccgguggu

SEQ ID NO: 344 - RNA, 19 nt, Artificial Sequence
  Description of Artificial Sequence: Synthetic oligonucleotide
gagcauggagccggugguc

SEQ ID NO: 345 - RNA, 19 nt, Artificial Sequence
  Description of Artificial Sequence: Synthetic oligonucleotide
agcauggagccgguggucc

SEQ ID NO: 346 - RNA, 19 nt, Artificial Sequence
  Description of Artificial Sequence: Synthetic oligonucleotide
gcauggagccggugguccg

SEQ ID NO: 347 - RNA, 19 nt, Artificial Sequence
  Description of Artificial Sequence: Synthetic oligonucleotide
cauggagccggugguccgc

SEQ ID NO: 348 - RNA, 19 nt, Artificial Sequence
  Description of Artificial Sequence: Synthetic oligonucleotide
auggagccggugguccgca

SEQ ID NO: 349 - RNA, 19 nt, Artificial Sequence
  Description of Artificial Sequence: Synthetic oligonucleotide
uggagccggugguccgcag

SEQ ID NO: 350 - RNA, 19 nt, Artificial Sequence
  Description of Artificial Sequence: Synthetic oligonucleotide
ggagccggugguccgcagg

SEQ ID NO: 351 - RNA, 19 nt, Artificial Sequence
  Description of Artificial Sequence: Synthetic oligonucleotide
gagccggugguccgcaggc

SEQ ID NO: 352 - RNA, 19 nt, Artificial Sequence
  Description of Artificial Sequence: Synthetic oligonucleotide
agccggugguccgcaggcu

SEQ ID NO: 353 - RNA, 19 nt, Artificial Sequence
  Description of Artificial Sequence: Synthetic oligonucleotide
gccggugguccgcaggcug

SEQ ID NO: 354 - RNA, 19 nt, Artificial Sequence
  Description of Artificial Sequence: Synthetic oligonucleotide
ccggugguccgcaggcugu

SEQ ID NO: 355 - RNA, 19 nt, Artificial Sequence
  Description of Artificial Sequence: Synthetic oligonucleotide
cggugguccgcaggcuguc

SEQ ID NO: 356 - RNA, 19 nt, Artificial Sequence
  Description of Artificial Sequence: Synthetic oligonucleotide
ggugguccgcaggcugucc

SEQ ID NO: 357 - RNA, 19 nt, Artificial Sequence
  Description of Artificial Sequence: Synthetic oligonucleotide
gugguccgcaggcugucca

SEQ ID NO: 358 - RNA, 19 nt, Artificial Sequence
  Description of Artificial Sequence: Synthetic oligonucleotide
ugguccgcaggcuguccac

SEQ ID NO: 359 - RNA, 19 nt, Artificial Sequence
  Description of Artificial Sequence: Synthetic oligonucleotide
gguccgcaggcuguccacc

SEQ ID NO: 360 - RNA, 19 nt, Artificial Sequence
  Description of Artificial Sequence: Synthetic oligonucleotide
guccgcaggcuguccaccc

SEQ ID NO: 361 - RNA, 19 nt, Artificial Sequence
  Description of Artificial Sequence: Synthetic oligonucleotide
uccgcaggcuguccaccca

SEQ ID NO: 362 - RNA, 19 nt, Artificial Sequence
  Description of Artificial Sequence: Synthetic oligonucleotide
ccgcaggcuguccacccag

SEQ ID NO: 363 - RNA, 19 nt, Artificial Sequence
  Description of Artificial Sequence: Synthetic oligonucleotide
cgcaggcuguccacccagu

SEQ ID NO: 364 - RNA, 19 nt, Artificial Sequence
  Description of Artificial Sequence: Synthetic oligonucleotide
gcaggcuguccacccaguu

SEQ ID NO: 365 - RNA, 19 nt, Artificial Sequence
  Description of Artificial Sequence: Synthetic oligonucleotide
caggcuguccacccaguuc

SEQ ID NO: 366 - RNA, 19 nt, Artificial Sequence
  Description of Artificial Sequence: Synthetic oligonucleotide
aggcuguccacccaguuca

SEQ ID NO: 367 - RNA, 19 nt, Artificial Sequence
  Description of Artificial Sequence: Synthetic oligonucleotide
ggcuguccacccaguucac

SEQ ID NO: 368 - RNA, 19 nt, Artificial Sequence
  Description of Artificial Sequence: Synthetic oligonucleotide
gcuguccacccaguucaca

SEQ ID NO: 369 - RNA, 19 nt, Artificial Sequence
  Description of Artificial Sequence: Synthetic oligonucleotide
cuguccacccaguucacag

SEQ ID NO: 370 - RNA, 19 nt, Artificial Sequence
  Description of Artificial Sequence: Synthetic oligonucleotide
uguccacccaguucacagc

SEQ ID NO: 371 - RNA, 19 nt, Artificial Sequence
  Description of Artificial Sequence: Synthetic oligonucleotide
guccacccaguucacagcu

SEQ ID NO: 372 - RNA, 19 nt, Artificial Sequence
  Description of Artificial Sequence: Synthetic oligonucleotide
uccacccaguucacagcug

SEQ ID NO: 373 - RNA, 19 nt, Artificial Sequence
  Description of Artificial Sequence: Synthetic oligonucleotide
ccacccaguucacagcugc

SEQ ID NO: 374 - RNA, 19 nt, Artificial Sequence
  Description of Artificial Sequence: Synthetic oligonucleotide
cacccaguucacagcugcc

SEQ ID NO: 375 - RNA, 19 nt, Artificial Sequence
  Description of Artificial Sequence: Synthetic oligonucleotide
acccaguucacagcugcca

SEQ ID NO: 376 - RNA, 19 nt, Artificial Sequence
  Description of Artificial Sequence: Synthetic oligonucleotide
cccaguucacagcugccaa

SEQ ID NO: 377 - RNA, 19 nt, Artificial Sequence
  Description of Artificial Sequence: Synthetic oligonucleotide
ccaguucacagcugccaau

SEQ ID NO: 378 - RNA, 19 nt, Artificial Sequence
  Description of Artificial Sequence: Synthetic oligonucleotide
caguucacagcugccaaug

SEQ ID NO: 379 - RNA, 19 nt, Artificial Sequence
  Description of Artificial Sequence: Synthetic oligonucleotide
aguucacagcugccaauga

SEQ ID NO: 380 - RNA, 19 nt, Artificial Sequence
  Description of Artificial Sequence: Synthetic oligonucleotide
guucacagcugccaaugag

SEQ ID NO: 381 - RNA, 19 nt, Artificial Sequence
  Description of Artificial Sequence: Synthetic oligonucleotide
uucacagcugccaaugagc

SEQ ID NO: 382 - RNA, 19 nt, Artificial Sequence
  Description of Artificial Sequence: Synthetic oligonucleotide
ucacagcugccaaugagcu

SEQ ID NO: 383 - RNA, 19 nt, Artificial Sequence
  Description of Artificial Sequence: Synthetic oligonucleotide
cacagcugccaaugagcug

SEQ ID NO: 384 - RNA, 19 nt, Artificial Sequence
  Description of Artificial Sequence: Synthetic oligonucleotide
acagcugccaaugagcugg

SEQ ID NO: 385 - RNA, 19 nt, Artificial Sequence
  Description of Artificial Sequence: Synthetic oligonucleotide
cagcugccaaugagcuggc

SEQ ID NO: 386 - RNA, 19 nt, Artificial Sequence
  Description of Artificial Sequence: Synthetic oligonucleotide
agcugccaaugagcuggcc

SEQ ID NO: 387 - RNA, 19 nt, Artificial Sequence
  Description of Artificial Sequence: Synthetic oligonucleotide
gcugccaaugagcuggccu

SEQ ID NO: 388 - RNA, 19 nt, Artificial Sequence
  Description of Artificial Sequence: Synthetic oligonucleotide
cugccaaugagcuggccug

SEQ ID NO: 389 - RNA, 19 nt, Artificial Sequence
  Description of Artificial Sequence: Synthetic oligonucleotide
ugccaaugagcuggccugc

SEQ ID NO: 390 - RNA, 19 nt, Artificial Sequence
  Description of Artificial Sequence: Synthetic oligonucleotide
gccaaugagcuggccugcc

SEQ ID NO: 391 - RNA, 19 nt, Artificial Sequence
  Description of Artificial Sequence: Synthetic oligonucleotide
ccaaugagcuggccugccg

SEQ ID NO: 392 - RNA, 19 nt, Artificial Sequence
  Description of Artificial Sequence: Synthetic oligonucleotide
caaugagcuggccugccga

SEQ ID NO: 393 - RNA, 19 nt, Artificial Sequence
  Description of Artificial Sequence: Synthetic oligonucleotide
aaugagcuggccugccgag

SEQ ID NO: 394 - RNA, 19 nt, Artificial Sequence
  Description of Artificial Sequence: Synthetic oligonucleotide
augagcuggccugccgagg

SEQ ID NO: 395 - RNA, 19 nt, Artificial Sequence
  Description of Artificial Sequence: Synthetic oligonucleotide
ugagcuggccugccgaggc

SEQ ID NO: 396 - RNA, 19 nt, Artificial Sequence
  Description of Artificial Sequence: Synthetic oligonucleotide
gagcuggccugccgaggcu

SEQ ID NO: 397 - RNA, 19 nt, Artificial Sequence
  Description of Artificial Sequence: Synthetic oligonucleotide
agcuggccugccgaggcuu

SEQ ID NO: 398 - RNA, 19 nt, Artificial Sequence
  Description of Artificial Sequence: Synthetic oligonucleotide
gcuggccugccgaggcuug

SEQ ID NO: 399 - RNA, 19 nt, Artificial Sequence
  Description of Artificial Sequence: Synthetic oligonucleotide
cuggccugccgaggcuugg

SEQ ID NO: 400 - RNA, 19 nt, Artificial Sequence
  Description of Artificial Sequence: Synthetic oligonucleotide
uggccugccgaggcuugga

SEQ ID NO: 401 - RNA, 19 nt, Artificial Sequence
  Description of Artificial Sequence: Synthetic oligonucleotide
ggccugccgaggcuuggac

SEQ ID NO: 402 - RNA, 19 nt, Artificial Sequence
  Description of Artificial Sequence: Synthetic oligonucleotide
gccugccgaggcuuggacc

SEQ ID NO: 403 - RNA, 19 nt, Artificial Sequence
  Description of Artificial Sequence: Synthetic oligonucleotide
ccugccgaggcuuggacca

SEQ ID NO: 404 - RNA, 19 nt, Artificial Sequence
  Description of Artificial Sequence: Synthetic oligonucleotide
cugccgaggcuuggaccac

SEQ ID NO: 405 - RNA, 19 nt, Artificial Sequence
  Description of Artificial Sequence: Synthetic oligonucleotide
ugccgaggcuuggaccacc

SEQ ID NO: 406 - RNA, 19 nt, Artificial Sequence
  Description of Artificial Sequence: Synthetic oligonucleotide
gccgaggcuuggaccaccu

SEQ ID NO: 407 - RNA, 19 nt, Artificial Sequence
  Description of Artificial Sequence: Synthetic oligonucleotide
ccgaggcuuggaccaccug

SEQ ID NO: 408 - RNA, 19 nt, Artificial Sequence
  Description of Artificial Sequence: Synthetic oligonucleotide
cgaggcuuggaccaccugg

SEQ ID NO: 409 - RNA, 19 nt, Artificial Sequence
  Description of Artificial Sequence: Synthetic oligonucleotide
gaggcuuggaccaccugga

SEQ ID NO: 410 - RNA, 19 nt, Artificial Sequence
  Description of Artificial Sequence: Synthetic oligonucleotide
aggcuuggaccaccuggag

SEQ ID NO: 411 - RNA, 19 nt, Artificial Sequence
  Description of Artificial Sequence: Synthetic oligonucleotide
ggcuuggaccaccuggagg

SEQ ID NO: 412 - RNA, 19 nt, Artificial Sequence
  Description of Artificial Sequence: Synthetic oligonucleotide
gcuuggaccaccuggagga

SEQ ID NO: 413 - RNA, 19 nt, Artificial Sequence
  Description of Artificial Sequence: Synthetic oligonucleotide
cuuggaccaccuggaggaa

SEQ ID NO: 414 - RNA, 19 nt, Artificial Sequence
  Description of Artificial Sequence: Synthetic oligonucleotide
uuggaccaccuggaggaaa

SEQ ID NO: 415 - RNA, 19 nt, Artificial Sequence
  Description of Artificial Sequence: Synthetic oligonucleotide
uggaccaccuggaggaaaa

SEQ ID NO: 416 - RNA, 19 nt, Artificial Sequence
  Description of Artificial Sequence: Synthetic oligonucleotide
ggaccaccuggaggaaaag

SEQ ID NO: 417 - RNA, 19 nt, Artificial Sequence
  Description of Artificial Sequence: Synthetic oligonucleotide
gaccaccuggaggaaaaga

SEQ ID NO: 418 - RNA, 19 nt, Artificial Sequence
  Description of Artificial Sequence: Synthetic oligonucleotide
accaccuggaggaaaagau

SEQ ID NO: 419 - RNA, 19 nt, Artificial Sequence
  Description of Artificial Sequence: Synthetic oligonucleotide
ccaccuggaggaaaagauc

SEQ ID NO: 420 - RNA, 19 nt, Artificial Sequence
  Description of Artificial Sequence: Synthetic oligonucleotide
caccuggaggaaaagaucc

SEQ ID NO: 421 - RNA, 19 nt, Artificial Sequence
  Description of Artificial Sequence: Synthetic oligonucleotide
accuggaggaaaagauccc

SEQ ID NO: 422 - RNA, 19 nt, Artificial Sequence
  Description of Artificial Sequence: Synthetic oligonucleotide
ccuggaggaaaagaucccc

SEQ ID NO: 423 - RNA, 19 nt, Artificial Sequence
  Description of Artificial Sequence: Synthetic oligonucleotide
cuggaggaaaagauccccg

SEQ ID NO: 424 - RNA, 19 nt, Artificial Sequence
  Description of Artificial Sequence: Synthetic oligonucleotide
uggaggaaaagauccccgc

SEQ ID NO: 425 - RNA, 19 nt, Artificial Sequence
  Description of Artificial Sequence: Synthetic oligonucleotide
ggaggaaaagauccccgcc

SEQ ID NO: 426 - RNA, 19 nt, Artificial Sequence
  Description of Artificial Sequence: Synthetic oligonucleotide
gaggaaaagauccccgccc

SEQ ID NO: 427 - RNA, 19 nt, Artificial Sequence
  Description of Artificial Sequence: Synthetic oligonucleotide
aggaaaagauccccgcccu

SEQ ID NO: 428 - RNA, 19 nt, Artificial Sequence
  Description of Artificial Sequence: Synthetic oligonucleotide
ggaaaagauccccgcccuc

SEQ ID NO: 429 - RNA, 19 nt, Artificial Sequence
  Description of Artificial Sequence: Synthetic oligonucleotide
gaaaagauccccgcccucc

SEQ ID NO: 430 - RNA, 19 nt, Artificial Sequence
  Description of Artificial Sequence: Synthetic oligonucleotide
aaaagauccccgcccucca

SEQ ID NO: 431 - RNA, 19 nt, Artificial Sequence
  Description of Artificial Sequence: Synthetic oligonucleotide
aaagauccccgcccuccag

SEQ ID NO: 432 - RNA, 19 nt, Artificial Sequence
  Description of Artificial Sequence: Synthetic oligonucleotide
aagauccccgcccuccagu

SEQ ID NO: 433 - RNA, 19 nt, Artificial Sequence
  Description of Artificial Sequence: Synthetic oligonucleotide
agauccccgcccuccagua

SEQ ID NO: 434 - RNA, 19 nt, Artificial Sequence
  Description of Artificial Sequence: Synthetic oligonucleotide
gauccccgcccuccaguac

SEQ ID NO: 435 - RNA, 19 nt, Artificial Sequence
  Description of Artificial Sequence: Synthetic oligonucleotide
auccccgcccuccaguacc

SEQ ID NO: 436 - RNA, 19 nt, Artificial Sequence
  Description of Artificial Sequence: Synthetic oligonucleotide
uccccgcccuccaguaccc

SEQ ID NO: 437 - RNA, 19 nt, Artificial Sequence
  Description of Artificial Sequence: Synthetic oligonucleotide
ccccgcccuccaguacccc

SEQ ID NO: 438 - RNA, 19 nt, Artificial Sequence
  Description of Artificial Sequence: Synthetic oligonucleotide
cccgcccuccaguaccccc

SEQ ID NO: 439 - RNA, 19 nt, Artificial Sequence
  Description of Artificial Sequence: Synthetic oligonucleotide
ccgcccuccaguacccccc

SEQ ID NO: 440 - RNA, 19 nt, Artificial Sequence
  Description of Artificial Sequence: Synthetic oligonucleotide
cgcccuccaguaccccccu

SEQ ID NO: 441 - RNA, 19 nt, Artificial Sequence
  Description of Artificial Sequence: Synthetic oligonucleotide
gcccuccaguaccccccug

SEQ ID NO: 442 - RNA, 19 nt, Artificial Sequence
  Description of Artificial Sequence: Synthetic oligonucleotide
cccuccaguaccccccuga

SEQ ID NO: 443 - RNA, 19 nt, Artificial Sequence
  Description of Artificial Sequence: Synthetic oligonucleotide
ccuccaguaccccccugaa

SEQ ID NO: 444 - RNA, 19 nt, Artificial Sequence
  Description of Artificial Sequence: Synthetic oligonucleotide
cuccaguaccccccugaaa

SEQ ID NO: 445 - RNA, 19 nt, Artificial Sequence
  Description of Artificial Sequence: Synthetic oligonucleotide
uccaguaccccccugaaaa

SEQ ID NO: 446 - RNA, 19 nt, Artificial Sequence
  Description of Artificial Sequence: Synthetic oligonucleotide
ccaguaccccccugaaaag

SEQ ID NO: 447 - RNA, 19 nt, Artificial Sequence
  Description of Artificial Sequence: Synthetic oligonucleotide
caguaccccccugaaaaga

SEQ ID NO: 448 - RNA, 19 nt, Artificial Sequence
  Description of Artificial Sequence: Synthetic oligonucleotide
aguaccccccugaaaagau

SEQ ID NO: 449 - RNA, 19 nt, Artificial Sequence
  Description of Artificial Sequence: Synthetic oligonucleotide
guaccccccugaaaagauu

SEQ ID NO: 450 - RNA, 19 nt, Artificial Sequence
  Description of Artificial Sequence: Synthetic oligonucleotide
uaccccccugaaaagauug

SEQ ID NO: 451 - RNA, 19 nt, Artificial Sequence
  Description of Artificial Sequence: Synthetic oligonucleotide
accccccugaaaagauugc

SEQ ID NO: 452 - RNA, 19 nt, Artificial Sequence
  Description of Artificial Sequence: Synthetic oligonucleotide
ccccccugaaaagauugcu

SEQ ID NO: 453 - RNA, 19 nt, Artificial Sequence
  Description of Artificial Sequence: Synthetic oligonucleotide
cccccugaaaagauugcuu

SEQ ID NO: 454 - RNA, 19 nt, Artificial Sequence
  Description of Artificial Sequence: Synthetic oligonucleotide
ccccugaaaagauugcuuc

SEQ ID NO: 455 - RNA, 19 nt, Artificial Sequence
  Description of Artificial Sequence: Synthetic oligonucleotide
cccugaaaagauugcuucu

SEQ ID NO: 456 - RNA, 19 nt, Artificial Sequence
  Description of Artificial Sequence: Synthetic oligonucleotide
ccugaaaagauugcuucug

SEQ ID NO: 457 - RNA, 19 nt, Artificial Sequence
  Description of Artificial Sequence: Synthetic oligonucleotide
cugaaaagauugcuucuga

SEQ ID NO: 458 - RNA, 19 nt, Artificial Sequence
  Description of Artificial Sequence: Synthetic oligonucleotide
ugaaaagauugcuucugag

SEQ ID NO: 459 - RNA, 19 nt, Artificial Sequence
  Description of Artificial Sequence: Synthetic oligonucleotide
gaaaagauugcuucugagc

SEQ ID NO: 460 - RNA, 19 nt, Artificial Sequence
  Description of Artificial Sequence: Synthetic oligonucleotide
aaaagauugcuucugagcu

SEQ ID NO: 461 - RNA, 19 nt, Artificial Sequence
  Description of Artificial Sequence: Synthetic oligonucleotide
aaagauugcuucugagcug

SEQ ID NO: 462 - RNA, 19 nt, Artificial Sequence
  Description of Artificial Sequence: Synthetic oligonucleotide
aagauugcuucugagcuga

SEQ ID NO: 463 - RNA, 19 nt, Artificial Sequence
  Description of Artificial Sequence: Synthetic oligonucleotide
agauugcuucugagcugaa

SEQ ID NO: 464 - RNA, 19 nt, Artificial Sequence
  Description of Artificial Sequence: Synthetic oligonucleotide
gauugcuucugagcugaag

SEQ ID NO: 465 - RNA, 19 nt, Artificial Sequence
  Description of Artificial Sequence: Synthetic oligonucleotide
auugcuucugagcugaagg

SEQ ID NO: 466 - RNA, 19 nt, Artificial Sequence
  Description of Artificial Sequence: Synthetic oligonucleotide
uugcuucugagcugaagga

SEQ ID NO: 467 - RNA, 19 nt, Artificial Sequence
  Description of Artificial Sequence: Synthetic oligonucleotide
ugcuucugagcugaaggac

SEQ ID NO: 468 - RNA, 19 nt, Artificial Sequence
  Description of Artificial Sequence: Synthetic oligonucleotide
gcuucugagcugaaggaca

SEQ ID NO: 469 - RNA, 19 nt, Artificial Sequence
  Description of Artificial Sequence: Synthetic oligonucleotide
cuucugagcugaaggacac

SEQ ID NO: 470 - RNA, 19 nt, Artificial Sequence
  Description of Artificial Sequence: Synthetic oligonucleotide
uucugagcugaaggacacc

SEQ ID NO: 471 - RNA, 19 nt, Artificial Sequence
  Description of Artificial Sequence: Synthetic oligonucleotide
ucugagcugaaggacacca

SEQ ID NO: 472 - RNA, 19 nt, Artificial Sequence
  Description of Artificial Sequence: Synthetic oligonucleotide
cugagcugaaggacaccau

SEQ ID NO: 473 - RNA, 19 nt, Artificial Sequence
  Description of Artificial Sequence: Synthetic oligonucleotide
ugagcugaaggacaccauc

SEQ ID NO: 474 - RNA, 19 nt, Artificial Sequence
  Description of Artificial Sequence: Synthetic oligonucleotide
gagcugaaggacaccaucu

SEQ ID NO: 475 - RNA, 19 nt, Artificial Sequence
  Description of Artificial Sequence: Synthetic oligonucleotide
agcugaaggacaccaucuc

SEQ ID NO: 476 - RNA, 19 nt, Artificial Sequence
  Description of Artificial Sequence: Synthetic oligonucleotide
gcugaaggacaccaucucc

SEQ ID NO: 477 - RNA, 19 nt, Artificial Sequence
  Description of Artificial Sequence: Synthetic oligonucleotide
cugaaggacaccaucucca

SEQ ID NO: 478 - RNA, 19 nt, Artificial Sequence
  Description of Artificial Sequence: Synthetic oligonucleotide
ugaaggacaccaucuccac

SEQ ID NO: 479 - RNA, 19 nt, Artificial Sequence
  Description of Artificial Sequence: Synthetic oligonucleotide
gaaggacaccaucuccacc

SEQ ID NO: 480 - RNA, 19 nt, Artificial Sequence
  Description of Artificial Sequence: Synthetic oligonucleotide
aaggacaccaucuccaccc

SEQ ID NO: 481 - RNA, 19 nt, Artificial Sequence
  Description of Artificial Sequence: Synthetic oligonucleotide
aggacaccaucuccacccg

SEQ ID NO: 482 - RNA, 19 nt, Artificial Sequence
  Description of Artificial Sequence: Synthetic oligonucleotide
ggacaccaucuccacccgc

SEQ ID NO: 483 - RNA, 19 nt, Artificial Sequence
  Description of Artificial Sequence: Synthetic oligonucleotide
gacaccaucuccacccgcc

SEQ ID NO: 484 - RNA, 19 nt, Artificial Sequence
  Description of Artificial Sequence: Synthetic oligonucleotide
acaccaucuccacccgccu

SEQ ID NO: 485 - RNA, 19 nt, Artificial Sequence
  Description of Artificial Sequence: Synthetic oligonucleotide
caccaucuccacccgccuc

SEQ ID NO: 486 - RNA, 19 nt, Artificial Sequence
  Description of Artificial Sequence: Synthetic oligonucleotide
accaucuccacccgccucc

SEQ ID NO: 487 - RNA, 19 nt, Artificial Sequence
  Description of Artificial Sequence: Synthetic oligonucleotide
ccaucuccacccgccuccg

SEQ ID NO: 488 - RNA, 19 nt, Artificial Sequence
  Description of Artificial Sequence: Synthetic oligonucleotide
caucuccacccgccuccgc

SEQ ID NO: 489 - RNA, 19 nt, Artificial Sequence
  Description of Artificial Sequence: Synthetic oligonucleotide
aucuccacccgccuccgca

SEQ ID NO: 490 - RNA, 19 nt, Artificial Sequence
  Description of Artificial Sequence: Synthetic oligonucleotide
ucuccacccgccuccgcag

SEQ ID NO: 491 - RNA, 19 nt, Artificial Sequence
  Description of Artificial Sequence: Synthetic oligonucleotide
cuccacccgccuccgcagu

SEQ ID NO: 492 - RNA, 19 nt, Artificial Sequence
  Description of Artificial Sequence: Synthetic oligonucleotide
uccacccgccuccgcagug

SEQ ID NO: 493 - RNA, 19 nt, Artificial Sequence
  Description of Artificial Sequence: Synthetic oligonucleotide
ccacccgccuccgcagugc

SEQ ID NO: 494 - RNA, 19 nt, Artificial Sequence
  Description of Artificial Sequence: Synthetic oligonucleotide
cacccgccuccgcagugcc

SEQ ID NO: 495 - RNA, 19 nt, Artificial Sequence
  Description of Artificial Sequence: Synthetic oligonucleotide
acccgccuccgcagugcca

SEQ ID NO: 496 - RNA, 19 nt, Artificial Sequence
  Description of Artificial Sequence: Synthetic oligonucleotide
cccgccuccgcagugccag

SEQ ID NO: 497 - RNA, 19 nt, Artificial Sequence
  Description of Artificial Sequence: Synthetic oligonucleotide
ccgccuccgcagugccaga

SEQ ID NO: 498 - RNA, 19 nt, Artificial Sequence
  Description of Artificial Sequence: Synthetic oligonucleotide
cgccuccgcagugccagaa

SEQ ID NO: 499 - RNA, 19 nt, Artificial Sequence
  Description of Artificial Sequence: Synthetic oligonucleotide
gccuccgcagugccagaaa

SEQ ID NO: 500 - RNA, 19 nt, Artificial Sequence
  Description of Artificial Sequence: Synthetic oligonucleotide
ccuccgcagugccagaaac

SEQ ID NO: 501 - RNA, 19 nt, Artificial Sequence
  Description of Artificial Sequence: Synthetic oligonucleotide
cuccgcagugccagaaaca

SEQ ID NO: 502 - RNA, 19 nt, Artificial Sequence
  Description of Artificial Sequence: Synthetic oligonucleotide
uccgcagugccagaaacag

SEQ ID NO: 503 - RNA, 19 nt, Artificial Sequence
  Description of Artificial Sequence: Synthetic oligonucleotide
ccgcagugccagaaacagc

SEQ ID NO: 504 - RNA, 19 nt, Artificial Sequence
  Description of Artificial Sequence: Synthetic oligonucleotide
cgcagugccagaaacagca

SEQ ID NO: 505 - RNA, 19 nt, Artificial Sequence
  Description of Artificial Sequence: Synthetic oligonucleotide
gcagugccagaaacagcau

SEQ ID NO: 506 - RNA, 19 nt, Artificial Sequence
  Description of Artificial Sequence: Synthetic oligonucleotide
cagugccagaaacagcauc

SEQ ID NO: 507 - RNA, 19 nt, Artificial Sequence
  Description of Artificial Sequence: Synthetic oligonucleotide
agugccagaaacagcauca

SEQ ID NO: 508 - RNA, 19 nt, Artificial Sequence
  Description of Artificial Sequence: Synthetic oligonucleotide
gugccagaaacagcaucag

SEQ ID NO: 509 - RNA, 19 nt, Artificial Sequence
  Description of Artificial Sequence: Synthetic oligonucleotide
ugccagaaacagcaucagc

SEQ ID NO: 510 - RNA, 19 nt, Artificial Sequence
  Description of Artificial Sequence: Synthetic oligonucleotide
gccagaaacagcaucagcg

SEQ ID NO: 511 - RNA, 19 nt, Artificial Sequence
  Description of Artificial Sequence: Synthetic oligonucleotide
ccagaaacagcaucagcgu

SEQ ID NO: 512 - RNA, 19 nt, Artificial Sequence
  Description of Artificial Sequence: Synthetic oligonucleotide
cagaaacagcaucagcguu

SEQ ID NO: 513 - RNA, 19 nt, Artificial Sequence
  Description of Artificial Sequence: Synthetic oligonucleotide
agaaacagcaucagcguuc

SEQ ID NO: 514 - RNA, 19 nt, Artificial Sequence
  Description of Artificial Sequence: Synthetic oligonucleotide
gaaacagcaucagcguucc

SEQ ID NO: 515 - RNA, 19 nt, Artificial Sequence
  Description of Artificial Sequence: Synthetic oligonucleotide
aaacagcaucagcguuccc

SEQ ID NO: 516 - RNA, 19 nt, Artificial Sequence
  Description of Artificial Sequence: Synthetic oligonucleotide
aacagcaucagcguuccca

SEQ ID NO: 517 - RNA, 19 nt, Artificial Sequence
  Description of Artificial Sequence: Synthetic oligonucleotide
acagcaucagcguucccau

SEQ ID NO: 518 - RNA, 19 nt, Artificial Sequence
  Description of Artificial Sequence: Synthetic oligonucleotide
cagcaucagcguucccauc

SEQ ID NO: 519 - RNA, 19 nt, Artificial Sequence
  Description of Artificial Sequence: Synthetic oligonucleotide
agcaucagcguucccaucg

SEQ ID NO: 520 - RNA, 19 nt, Artificial Sequence
  Description of Artificial Sequence: Synthetic oligonucleotide
gcaucagcguucccaucgc

SEQ ID NO: 521 - RNA, 19 nt, Artificial Sequence
  Description of Artificial Sequence: Synthetic oligonucleotide
caucagcguucccaucgcg

SEQ ID NO: 522 - RNA, 19 nt, Artificial Sequence
  Description of Artificial Sequence: Synthetic oligonucleotide
aucagcguucccaucgcga

SEQ ID NO: 523 - RNA, 19 nt, Artificial Sequence
  Description of Artificial Sequence: Synthetic oligonucleotide
ucagcguucccaucgcgag

SEQ ID NO: 524 - RNA, 19 nt, Artificial Sequence
  Description of Artificial Sequence: Synthetic oligonucleotide
cagcguucccaucgcgagc

SEQ ID NO: 525 - RNA, 19 nt, Artificial Sequence
  Description of Artificial Sequence: Synthetic oligonucleotide
agcguucccaucgcgagca

SEQ ID NO: 526 - RNA, 19 nt, Artificial Sequence
  Description of Artificial Sequence: Synthetic oligonucleotide
gcguucccaucgcgagcac

SEQ ID NO: 527 - RNA, 19 nt, Artificial Sequence
  Description of Artificial Sequence: Synthetic oligonucleotide
cguucccaucgcgagcacu

SEQ ID NO: 528 - RNA, 19 nt, Artificial Sequence
  Description of Artificial Sequence: Synthetic oligonucleotide
guucccaucgcgagcacuu

SEQ ID NO: 529 - RNA, 19 nt, Artificial Sequence
  Description of Artificial Sequence: Synthetic oligonucleotide
uucccaucgcgagcacuuc

SEQ ID NO: 530 - RNA, 19 nt, Artificial Sequence
  Description of Artificial Sequence: Synthetic oligonucleotide
ucccaucgcgagcacuuca

SEQ ID NO: 531 - RNA, 19 nt, Artificial Sequence
  Description of Artificial Sequence: Synthetic oligonucleotide
cccaucgcgagcacuucag

SEQ ID NO: 532 - RNA, 19 nt, Artificial Sequence
  Description of Artificial Sequence: Synthetic oligonucleotide
ccaucgcgagcacuucaga

SEQ ID NO: 533 - RNA, 19 nt, Artificial Sequence
  Description of Artificial Sequence: Synthetic oligonucleotide
caucgcgagcacuucagac

SEQ ID NO: 534 - RNA, 19 nt, Artificial Sequence
  Description of Artificial Sequence: Synthetic oligonucleotide
aucgcgagcacuucagaca

SEQ ID NO: 535 - RNA, 19 nt, Artificial Sequence
  Description of Artificial Sequence: Synthetic oligonucleotide
ucgcgagcacuucagacaa

SEQ ID NO: 536 - RNA, 19 nt, Artificial Sequence
  Description of Artificial Sequence: Synthetic oligonucleotide
cgcgagcacuucagacaag

SEQ ID NO: 537 - RNA, 19 nt, Artificial Sequence
  Description of Artificial Sequence: Synthetic oligonucleotide
gcgagcacuucagacaagg

SEQ ID NO: 538 - RNA, 19 nt, Artificial Sequence
  Description of Artificial Sequence: Synthetic oligonucleotide
cgagcacuucagacaaggu

SEQ ID NO: 539 - RNA, 19 nt, Artificial Sequence
  Description of Artificial Sequence: Synthetic oligonucleotide
gagcacuucagacaagguc

SEQ ID NO: 540 - RNA, 19 nt, Artificial Sequence
  Description of Artificial Sequence: Synthetic oligonucleotide
agcacuucagacaaggucc

SEQ ID NO: 541 - RNA, 19 nt, Artificial Sequence
  Description of Artificial Sequence: Synthetic oligonucleotide
gcacuucagacaagguccu

SEQ ID NO: 542 - RNA, 19 nt, Artificial Sequence
  Description of Artificial Sequence: Synthetic oligonucleotide
cacuucagacaagguccug

SEQ ID NO: 543 - RNA, 19 nt, Artificial Sequence
  Description of Artificial Sequence: Synthetic oligonucleotide
acuucagacaagguccugg

SEQ ID NO: 544 - RNA, 19 nt, Artificial Sequence
  Description of Artificial Sequence: Synthetic oligonucleotide
cuucagacaagguccuggg

SEQ ID NO: 545 - RNA, 19 nt, Artificial Sequence
  Description of Artificial Sequence: Synthetic oligonucleotide
uucagacaagguccugggg

SEQ ID NO: 546 - RNA, 19 nt, Artificial Sequence
  Description of Artificial Sequence: Synthetic oligonucleotide
ucagacaagguccuggggg

SEQ ID NO: 547 - RNA, 19 nt, Artificial Sequence
  Description of Artificial Sequence: Synthetic oligonucleotide
cagacaagguccugggggc

SEQ ID NO: 548 - RNA, 19 nt, Artificial Sequence
  Description of Artificial Sequence: Synthetic oligonucleotide
agacaagguccugggggcc

SEQ ID NO: 549 - RNA, 19 nt, Artificial Sequence
  Description of Artificial Sequence: Synthetic oligonucleotide
gacaagguccugggggccg

SEQ ID NO: 550 - RNA, 19 nt, Artificial Sequence
  Description of Artificial Sequence: Synthetic oligonucleotide
acaagguccugggggccgc

SEQ ID NO: 551 - RNA, 19 nt, Artificial Sequence
  Description of Artificial Sequence: Synthetic oligonucleotide
caagguccugggggccgcu

SEQ ID NO: 552 - RNA, 19 nt, Artificial Sequence
  Description of Artificial Sequence: Synthetic oligonucleotide
aagguccugggggccgcuu

SEQ ID NO: 553 - RNA, 19 nt, Artificial Sequence
  Description of Artificial Sequence: Synthetic oligonucleotide
agguccugggggccgcuuu

SEQ ID NO: 554 - RNA, 19 nt, Artificial Sequence
  Description of Artificial Sequence: Synthetic oligonucleotide
gguccugggggccgcuuug

SEQ ID NO: 555 - RNA, 19 nt, Artificial Sequence
  Description of Artificial Sequence: Synthetic oligonucleotide
guccugggggccgcuuugg

SEQ ID NO: 556 - RNA, 19 nt, Artificial Sequence
  Description of Artificial Sequence: Synthetic oligonucleotide
uccugggggccgcuuuggc

SEQ ID NO: 557 - RNA, 19 nt, Artificial Sequence
  Description of Artificial Sequence: Synthetic oligonucleotide
ccugggggccgcuuuggcc

SEQ ID NO: 558 - RNA, 19 nt, Artificial Sequence
  Description of Artificial Sequence: Synthetic oligonucleotide
cugggggccgcuuuggccg

SEQ ID NO: 559 - RNA, 19 nt, Artificial Sequence
  Description of Artificial Sequence: Synthetic oligonucleotide
ugggggccgcuuuggccgg

SEQ ID NO: 560 - RNA, 19 nt, Artificial Sequence
  Description of Artificial Sequence: Synthetic oligonucleotide
gggggccgcuuuggccggg

SEQ ID NO: 561 - RNA, 19 nt, Artificial Sequence
  Description of Artificial Sequence: Synthetic oligonucleotide
ggggccgcuuuggccgggu

SEQ ID NO: 562 - RNA, 19 nt, Artificial Sequence
  Description of Artificial Sequence: Synthetic oligonucleotide
gggccgcuuuggccgggug

SEQ ID NO: 563 - RNA, 19 nt, Artificial Sequence
  Description of Artificial Sequence: Synthetic oligonucleotide
ggccgcuuuggccgggugc

SEQ ID NO: 564 - RNA, 19 nt, Artificial Sequence
  Description of Artificial Sequence: Synthetic oligonucleotide
gccgcuuuggccgggugcg

SEQ ID NO: 565 - RNA, 19 nt, Artificial Sequence
  Description of Artificial Sequence: Synthetic oligonucleotide
ccgcuuuggccgggugcga

SEQ ID NO: 566 - RNA, 19 nt, Artificial Sequence
  Description of Artificial Sequence: Synthetic oligonucleotide
cgcuuuggccgggugcgag

SEQ ID NO: 567 - RNA, 19 nt, Artificial Sequence
  Description of Artificial Sequence: Synthetic oligonucleotide
gcuuuggccgggugcgagc

SEQ ID NO: 568 - RNA, 19 nt, Artificial Sequence
  Description of Artificial Sequence: Synthetic oligonucleotide
cuuuggccgggugcgagcu

SEQ ID NO: 569 - RNA, 19 nt, Artificial Sequence
  Description of Artificial Sequence: Synthetic oligonucleotide
uuuggccgggugcgagcuu

SEQ ID NO: 570 - RNA, 19 nt, Artificial Sequence
  Description of Artificial Sequence: Synthetic oligonucleotide
uuggccgggugcgagcuug

SEQ ID NO: 571 - RNA, 19 nt, Artificial Sequence
  Description of Artificial Sequence: Synthetic oligonucleotide
uggccgggugcgagcuugc

SEQ ID NO: 572 - RNA, 19 nt, Artificial Sequence
  Description of Artificial Sequence: Synthetic oligonucleotide
ggccgggugcgagcuugcc

SEQ ID NO: 573 - RNA, 19 nt, Artificial Sequence
  Description of Artificial Sequence: Synthetic oligonucleotide
gccgggugcgagcuugccu

SEQ ID NO: 574 - RNA, 19 nt, Artificial Sequence
  Description of Artificial Sequence: Synthetic oligonucleotide
ccgggugcgagcuugccug

SEQ ID NO: 575 - RNA, 19 nt, Artificial Sequence
  Description of Artificial Sequence: Synthetic oligonucleotide
cgggugcgagcuugccugg

SEQ ID NO: 576 - RNA, 19 nt, Artificial Sequence
  Description of Artificial Sequence: Synthetic oligonucleotide
gggugcgagcuugccuggg

SEQ ID NO: 577 - RNA, 19 nt, Artificial Sequence
  Description of Artificial Sequence: Synthetic oligonucleotide
ggugcgagcuugccugggg

SEQ ID NO: 578 - RNA, 19 nt, Artificial Sequence
  Description of Artificial Sequence: Synthetic oligonucleotide
gugcgagcuugccuggggg

SEQ ID NO: 579 - RNA, 19 nt, Artificial Sequence
  Description of Artificial Sequence: Synthetic oligonucleotide
ugcgagcuugccugggggg

SEQ ID NO: 580 - RNA, 19 nt, Artificial Sequence
  Description of Artificial Sequence: Synthetic oligonucleotide
gcgagcuugccuggggggu

SEQ ID NO: 581 - RNA, 19 nt, Artificial Sequence
  Description of Artificial Sequence: Synthetic oligonucleotide
cgagcuugccuggggggug

SEQ ID NO: 582 - RNA, 19 nt, Artificial Sequence
  Description of Artificial Sequence: Synthetic oligonucleotide
gagcuugccuggggggugg

SEQ ID NO: 583 - RNA, 19 nt, Artificial Sequence
  Description of Artificial Sequence: Synthetic oligonucleotide
agcuugccugggggguggc

SEQ ID NO: 584 - RNA, 19 nt, Artificial Sequence
  Description of Artificial Sequence: Synthetic oligonucleotide
gcuugccugggggguggcc

SEQ ID NO: 585 - RNA, 19 nt, Artificial Sequence
  Description of Artificial Sequence: Synthetic oligonucleotide
cuugccugggggguggcca

SEQ ID NO: 586 - RNA, 19 nt, Artificial Sequence
  Description of Artificial Sequence: Synthetic oligonucleotide
uugccugggggguggccag

SEQ ID NO: 587 - RNA, 19 nt, Artificial Sequence
  Description of Artificial Sequence: Synthetic oligonucleotide
ugccugggggguggccaga

SEQ ID NO: 588 - RNA, 19 nt, Artificial Sequence
  Description of Artificial Sequence: Synthetic oligonucleotide
gccugggggguggccagag

SEQ ID NO: 589 - RNA, 19 nt, Artificial Sequence
  Description of Artificial Sequence: Synthetic oligonucleotide
ccugggggguggccagaga

SEQ ID NO: 590 - RNA, 19 nt, Artificial Sequence
  Description of Artificial Sequence: Synthetic oligonucleotide
cugggggguggccagagac

SEQ ID NO: 591 - RNA, 19 nt, Artificial Sequence
  Description of Artificial Sequence: Synthetic oligonucleotide
ugggggguggccagagaca

SEQ ID NO: 592 - RNA, 19 nt, Artificial Sequence
  Description of Artificial Sequence: Synthetic oligonucleotide
gggggguggccagagacac

SEQ ID NO: 593 - RNA, 19 nt, Artificial Sequence
  Description of Artificial Sequence: Synthetic oligonucleotide
ggggguggccagagacacu

SEQ ID NO: 594 - RNA, 19 nt, Artificial Sequence
  Description of Artificial Sequence: Synthetic oligonucleotide
gggguggccagagacacug

SEQ ID NO: 595 - RNA, 19 nt, Artificial Sequence
  Description of Artificial Sequence: Synthetic oligonucleotide
ggguggccagagacacugc

SEQ ID NO: 596 - RNA, 19 nt, Artificial Sequence
  Description of Artificial Sequence: Synthetic oligonucleotide
gguggccagagacacugcg

SEQ ID NO: 597 - RNA, 19 nt, Artificial Sequence
  Description of Artificial Sequence: Synthetic oligonucleotide
guggccagagacacugcgg

SEQ ID NO: 598 - RNA, 19 nt, Artificial Sequence
  Description of Artificial Sequence: Synthetic oligonucleotide
uggccagagacacugcgga

SEQ ID NO: 599 - RNA, 19 nt, Artificial Sequence
  Description of Artificial Sequence: Synthetic oligonucleotide
ggccagagacacugcggaa

SEQ ID NO: 600 - RNA, 19 nt, Artificial Sequence
  Description of Artificial Sequence: Synthetic oligonucleotide
gccagagacacugcggaau

SEQ ID NO: 601 - RNA, 19 nt, Artificial Sequence
  Description of Artificial Sequence: Synthetic oligonucleotide
ccagagacacugcggaauu

SEQ ID NO: 602 - RNA, 19 nt, Artificial Sequence
  Description of Artificial Sequence: Synthetic oligonucleotide
cagagacacugcggaauuu

SEQ ID NO: 603 - RNA, 19 nt, Artificial Sequence
  Description of Artificial Sequence: Synthetic oligonucleotide
agagacacugcggaauuug

SEQ ID NO: 604 - RNA, 19 nt, Artificial Sequence
  Description of Artificial Sequence: Synthetic oligonucleotide
gagacacugcggaauuugc

SEQ ID NO: 605 - RNA, 19 nt, Artificial Sequence
  Description of Artificial Sequence: Synthetic oligonucleotide
agacacugcggaauuugcu

SEQ ID NO: 606 - RNA, 19 nt, Artificial Sequence
  Description of Artificial Sequence: Synthetic oligonucleotide
gacacugcggaauuugcug

SEQ ID NO: 607 - RNA, 19 nt, Artificial Sequence
  Description of Artificial Sequence: Synthetic oligonucleotide
acacugcggaauuugcugc

SEQ ID NO: 608 - RNA, 19 nt, Artificial Sequence
  Description of Artificial Sequence: Synthetic oligonucleotide
cacugcggaauuugcugcc

SEQ ID NO: 609 - RNA, 19 nt, Artificial Sequence
  Description of Artificial Sequence: Synthetic oligonucleotide
acugcggaauuugcugcca

SEQ ID NO: 610 - RNA, 19 nt, Artificial Sequence
  Description of Artificial Sequence: Synthetic oligonucleotide
cugcggaauuugcugccaa

SEQ ID NO: 611 - RNA, 19 nt, Artificial Sequence
  Description of Artificial Sequence: Synthetic oligonucleotide
ugcggaauuugcugccaac

SEQ ID NO: 612 - RNA, 19 nt, Artificial Sequence
  Description of Artificial Sequence: Synthetic oligonucleotide
gcggaauuugcugccaaca

SEQ ID NO: 613 - RNA, 19 nt, Artificial Sequence
  Description of Artificial Sequence: Synthetic oligonucleotide
cggaauuugcugccaacac

SEQ ID NO: 614 - RNA, 19 nt, Artificial Sequence
  Description of Artificial Sequence: Synthetic oligonucleotide
ggaauuugcugccaacacu

SEQ ID NO: 615 - RNA, 19 nt, Artificial Sequence
  Description of Artificial Sequence: Synthetic oligonucleotide
gaauuugcugccaacacuc

SEQ ID NO: 616 - RNA, 19 nt, Artificial Sequence
  Description of Artificial Sequence: Synthetic oligonucleotide
aauuugcugccaacacucg

SEQ ID NO: 617 - RNA, 19 nt, Artificial Sequence
  Description of Artificial Sequence: Synthetic oligonucleotide
auuugcugccaacacucga

SEQ ID NO: 618 - RNA, 19 nt, Artificial Sequence
  Description of Artificial Sequence: Synthetic oligonucleotide
uuugcugccaacacucgag

SEQ ID NO: 619 - RNA, 19 nt, Artificial Sequence
  Description of Artificial Sequence: Synthetic oligonucleotide
uugcugccaacacucgagc

SEQ ID NO: 620 - RNA, 19 nt, Artificial Sequence
  Description of Artificial Sequence: Synthetic oligonucleotide
ugcugccaacacucgagcu

SEQ ID NO: 621 - RNA, 19 nt, Artificial Sequence
  Description of Artificial Sequence: Synthetic oligonucleotide
gcugccaacacucgagcug

SEQ ID NO: 622 - RNA, 19 nt, Artificial Sequence
  Description of Artificial Sequence: Synthetic oligonucleotide
cugccaacacucgagcugg

SEQ ID NO: 623 - RNA, 19 nt, Artificial Sequence
  Description of Artificial Sequence: Synthetic oligonucleotide
ugccaacacucgagcuggc

SEQ ID NO: 624 - RNA, 19 nt, Artificial Sequence
  Description of Artificial Sequence: Synthetic oligonucleotide
gccaacacucgagcuggcc

SEQ ID NO: 625 - RNA, 19 nt, Artificial Sequence
  Description of Artificial Sequence: Synthetic oligonucleotide
ccaacacucgagcuggccg

SEQ ID NO: 626 - RNA, 19 nt, Artificial Sequence
  Description of Artificial Sequence: Synthetic oligonucleotide
caacacucgagcuggccga

SEQ ID NO: 627 - RNA, 19 nt, Artificial Sequence
  Description of Artificial Sequence: Synthetic oligonucleotide
aacacucgagcuggccgac

SEQ ID NO: 628 - RNA, 19 nt, Artificial Sequence
  Description of Artificial Sequence: Synthetic oligonucleotide
acacucgagcuggccgacu

SEQ ID NO: 629 - RNA, 19 nt, Artificial Sequence
  Description of Artificial Sequence: Synthetic oligonucleotide
cacucgagcuggccgacug

SEQ ID NO: 630 - RNA, 19 nt, Artificial Sequence
  Description of Artificial Sequence: Synthetic oligonucleotide
acucgagcuggccgacugg

SEQ ID NO: 631 - RNA, 19 nt, Artificial Sequence
  Description of Artificial Sequence: Synthetic oligonucleotide
cucgagcuggccgacuggc

SEQ ID NO: 632 - RNA, 19 nt, Artificial Sequence
  Description of Artificial Sequence: Synthetic oligonucleotide
ucgagcuggccgacuggcu

SEQ ID NO: 633 - RNA, 19 nt, Artificial Sequence
  Description of Artificial Sequence: Synthetic oligonucleotide
cgagcuggccgacuggcuu

SEQ ID NO: 634 - RNA, 19 nt, Artificial Sequence
  Description of Artificial Sequence: Synthetic oligonucleotide
gagcuggccgacuggcuuc

SEQ ID NO: 635 - RNA, 19 nt, Artificial Sequence
  Description of Artificial Sequence: Synthetic oligonucleotide
agcuggccgacuggcuucu

SEQ ID NO: 636 - RNA, 19 nt, Artificial Sequence
  Description of Artificial Sequence: Synthetic oligonucleotide
gcuggccgacuggcuucug

SEQ ID NO: 637 - RNA, 19 nt, Artificial Sequence
  Description of Artificial Sequence: Synthetic oligonucleotide
cuggccgacuggcuucugg

SEQ ID NO: 638 - RNA, 19 nt, Artificial Sequence
  Description of Artificial Sequence: Synthetic oligonucleotide
uggccgacuggcuucugga

SEQ ID NO: 639 - RNA, 19 nt, Artificial Sequence
  Description of Artificial Sequence: Synthetic oligonucleotide
ggccgacuggcuucuggag

SEQ ID NO: 640 - RNA, 19 nt, Artificial Sequence
  Description of Artificial Sequence: Synthetic oligonucleotide
gccgacuggcuucuggagg

SEQ ID NO: 641 - RNA, 19 nt, Artificial Sequence
  Description of Artificial Sequence: Synthetic oligonucleotide
ccgacuggcuucuggaggg

SEQ ID NO: 642 - RNA, 19 nt, Artificial Sequence
  Description of Artificial Sequence: Synthetic oligonucleotide
cgacuggcuucuggagggg

SEQ ID NO: 643 - RNA, 19 nt, Artificial Sequence
  Description of Artificial Sequence: Synthetic oligonucleotide
gacuggcuucuggaggggc

SEQ ID NO: 644 - RNA, 19 nt, Artificial Sequence
  Description of Artificial Sequence: Synthetic oligonucleotide
acuggcuucuggaggggcc

SEQ ID NO: 645 - RNA, 19 nt, Artificial Sequence
  Description of Artificial Sequence: Synthetic oligonucleotide
cuggcuucuggaggggccg

SEQ ID NO: 646 - RNA, 19 nt, Artificial Sequence
  Description of Artificial Sequence: Synthetic oligonucleotide
uggcuucuggaggggccga

SEQ ID NO: 647 - RNA, 19 nt, Artificial Sequence
  Description of Artificial Sequence: Synthetic oligonucleotide
ggcuucuggaggggccgac

SEQ ID NO: 648 - RNA, 19 nt, Artificial Sequence
  Description of Artificial Sequence: Synthetic oligonucleotide
gcuucuggaggggccgacu

SEQ ID NO: 649 - RNA, 19 nt, Artificial Sequence
  Description of Artificial Sequence: Synthetic oligonucleotide
cuucuggaggggccgacuu

SEQ ID NO: 650 - RNA, 19 nt, Artificial Sequence
  Description of Artificial Sequence: Synthetic oligonucleotide
uucuggaggggccgacuug

SEQ ID NO: 651 - RNA, 19 nt, Artificial Sequence
  Description of Artificial Sequence: Synthetic oligonucleotide
ucuggaggggccgacuugg

SEQ ID NO: 652 - RNA, 19 nt, Artificial Sequence
  Description of Artificial Sequence: Synthetic oligonucleotide
cuggaggggccgacuuggc

SEQ ID NO: 653 - RNA, 19 nt, Artificial Sequence
  Description of Artificial Sequence: Synthetic oligonucleotide
uggaggggccgacuuggcc

SEQ ID NO: 654 - RNA, 19 nt, Artificial Sequence
  Description of Artificial Sequence: Synthetic oligonucleotide
ggaggggccgacuuggccu

SEQ ID NO: 655 - RNA, 19 nt, Artificial Sequence
  Description of Artificial Sequence: Synthetic oligonucleotide
gaggggccgacuuggccuu

SEQ ID NO: 656 - RNA, 19 nt, Artificial Sequence
  Description of Artificial Sequence: Synthetic oligonucleotide
aggggccgacuuggccuug

SEQ ID NO: 657 - RNA, 19 nt, Artificial Sequence
  Description of Artificial Sequence: Synthetic oligonucleotide
ggggccgacuuggccuugg

SEQ ID NO: 658 - RNA, 19 nt, Artificial Sequence
  Description of Artificial Sequence: Synthetic oligonucleotide
gggccgacuuggccuuggg

SEQ ID NO: 659 - RNA, 19 nt, Artificial Sequence
  Description of Artificial Sequence: Synthetic oligonucleotide
ggccgacuuggccuugggc

SEQ ID NO: 660 - RNA, 19 nt, Artificial Sequence
  Description of Artificial Sequence: Synthetic oligonucleotide
gccgacuuggccuugggca

SEQ ID NO: 661 - RNA, 19 nt, Artificial Sequence
  Description of Artificial Sequence: Synthetic oligonucleotide
ccgacuuggccuugggcag

SEQ ID NO: 662 - RNA, 19 nt, Artificial Sequence
  Description of Artificial Sequence: Synthetic oligonucleotide
cgacuuggccuugggcagc

SEQ ID NO: 663 - RNA, 19 nt, Artificial Sequence
  Description of Artificial Sequence: Synthetic oligonucleotide
gacuuggccuugggcagca

SEQ ID NO: 664 - RNA, 19 nt, Artificial Sequence
  Description of Artificial Sequence: Synthetic oligonucleotide
acuuggccuugggcagcau

SEQ ID NO: 665 - RNA, 19 nt, Artificial Sequence
  Description of Artificial Sequence: Synthetic oligonucleotide
cuuggccuugggcagcauu

SEQ ID NO: 666 - RNA, 19 nt, Artificial Sequence
  Description of Artificial Sequence: Synthetic oligonucleotide
uuggccuugggcagcauug

SEQ ID NO: 667 - RNA, 19 nt, Artificial Sequence
  Description of Artificial Sequence: Synthetic oligonucleotide
uggccuugggcagcauuga

SEQ ID NO: 668 - RNA, 19 nt, Artificial Sequence
  Description of Artificial Sequence: Synthetic oligonucleotide
ggccuugggcagcauugag

SEQ ID NO: 669 - RNA, 19 nt, Artificial Sequence
  Description of Artificial Sequence: Synthetic oligonucleotide
gccuugggcagcauugaga

SEQ ID NO: 670 - RNA, 19 nt, Artificial Sequence
  Description of Artificial Sequence: Synthetic oligonucleotide
ccuugggcagcauugagaa

SEQ ID NO: 671 - RNA, 19 nt, Artificial Sequence
  Description of Artificial Sequence: Synthetic oligonucleotide
cuugggcagcauugagaag

SEQ ID NO: 672 - RNA, 19 nt, Artificial Sequence
  Description of Artificial Sequence: Synthetic oligonucleotide
uugggcagcauugagaagg

SEQ ID NO: 673 - RNA, 19 nt, Artificial Sequence
  Description of Artificial Sequence: Synthetic oligonucleotide
ugggcagcauugagaaggu

SEQ ID NO: 674 - RNA, 19 nt, Artificial Sequence
  Description of Artificial Sequence: Synthetic oligonucleotide
gggcagcauugagaaggug

SEQ ID NO: 675 - RNA, 19 nt, Artificial Sequence
  Description of Artificial Sequence: Synthetic oligonucleotide
ggcagcauugagaaggugg

SEQ ID NO: 676 - RNA, 19 nt, Artificial Sequence
  Description of Artificial Sequence: Synthetic oligonucleotide
gcagcauugagaagguggu

SEQ ID NO: 677 - RNA, 19 nt, Artificial Sequence
  Description of Artificial Sequence: Synthetic oligonucleotide
cagcauugagaagguggug

SEQ ID NO: 678 - RNA, 19 nt, Artificial Sequence
  Description of Artificial Sequence: Synthetic oligonucleotide
agcauugagaagguggugg

SEQ ID NO: 679 - RNA, 19 nt, Artificial Sequence
  Description of Artificial Sequence: Synthetic oligonucleotide
gcauugagaagguggugga

SEQ ID NO: 680 - RNA, 19 nt, Artificial Sequence
  Description of Artificial Sequence: Synthetic oligonucleotide
cauugagaaggugguggag

SEQ ID NO: 681 - RNA, 19 nt, Artificial Sequence
  Description of Artificial Sequence: Synthetic oligonucleotide
auugagaaggugguggagu

SEQ ID NO: 682 - RNA, 19 nt, Artificial Sequence
  Description of Artificial Sequence: Synthetic oligonucleotide
uugagaaggugguggagua

SEQ ID NO: 683 - RNA, 19 nt, Artificial Sequence
  Description of Artificial Sequence: Synthetic oligonucleotide
ugagaaggugguggaguac

SEQ ID NO: 684 - RNA, 19 nt, Artificial Sequence
  Description of Artificial Sequence: Synthetic oligonucleotide
gagaaggugguggaguacc

SEQ ID NO: 685 - RNA, 19 nt, Artificial Sequence
  Description of Artificial Sequence: Synthetic oligonucleotide
agaaggugguggaguaccu

SEQ ID NO: 686 - RNA, 19 nt, Artificial Sequence
  Description of Artificial Sequence: Synthetic oligonucleotide
gaaggugguggaguaccuc

SEQ ID NO: 687 - RNA, 19 nt, Artificial Sequence
  Description of Artificial Sequence: Synthetic oligonucleotide
aaggugguggaguaccucc

SEQ ID NO: 688 - RNA, 19 nt, Artificial Sequence
  Description of Artificial Sequence: Synthetic oligonucleotide
aggugguggaguaccuccu

SEQ ID NO: 689 - RNA, 19 nt, Artificial Sequence
  Description of Artificial Sequence: Synthetic oligonucleotide
ggugguggaguaccuccuc

SEQ ID NO: 690 - RNA, 19 nt, Artificial Sequence
  Description of Artificial Sequence: Synthetic oligonucleotide
gugguggaguaccuccucc

SEQ ID NO: 691 - RNA, 19 nt, Artificial Sequence
  Description of Artificial Sequence: Synthetic oligonucleotide
ugguggaguaccuccuccc

SEQ ID NO: 692 - RNA, 19 nt, Artificial Sequence
  Description of Artificial Sequence: Synthetic oligonucleotide
gguggaguaccuccucccu

SEQ ID NO: 693 - RNA, 19 nt, Artificial Sequence
  Description of Artificial Sequence: Synthetic oligonucleotide
guggaguaccuccucccuc

SEQ ID NO: 694 - RNA, 19 nt, Artificial Sequence
  Description of Artificial Sequence: Synthetic oligonucleotide
uggaguaccuccucccucc

SEQ ID NO: 695 - RNA, 19 nt, Artificial Sequence
  Description of Artificial Sequence: Synthetic oligonucleotide
ggaguaccuccucccucca

SEQ ID NO: 696 - RNA, 19 nt, Artificial Sequence
  Description of Artificial Sequence: Synthetic oligonucleotide
gaguaccuccucccuccag

SEQ ID NO: 697 - RNA, 19 nt, Artificial Sequence
  Description of Artificial Sequence: Synthetic oligonucleotide
aguaccuccucccuccaga

SEQ ID NO: 698 - RNA, 19 nt, Artificial Sequence
  Description of Artificial Sequence: Synthetic oligonucleotide
guaccuccucccuccagac

SEQ ID NO: 699 - RNA, 19 nt, Artificial Sequence
  Description of Artificial Sequence: Synthetic oligonucleotide
uaccuccucccuccagaca

SEQ ID NO: 700 - RNA, 19 nt, Artificial Sequence
  Description of Artificial Sequence: Synthetic oligonucleotide
accuccucccuccagacaa

SEQ ID NO: 701 - RNA, 19 nt, Artificial Sequence
  Description of Artificial Sequence: Synthetic oligonucleotide
ccuccucccuccagacaag

SEQ ID NO: 702 - RNA, 19 nt, Artificial Sequence
  Description of Artificial Sequence: Synthetic oligonucleotide
cuccucccuccagacaagg

SEQ ID NO: 703 - RNA, 19 nt, Artificial Sequence
  Description of Artificial Sequence: Synthetic oligonucleotide
uccucccuccagacaagga

SEQ ID NO: 704 - RNA, 19 nt, Artificial Sequence
  Description of Artificial Sequence: Synthetic oligonucleotide
ccucccuccagacaaggaa

SEQ ID NO: 705 - RNA, 19 nt, Artificial Sequence
  Description of Artificial Sequence: Synthetic oligonucleotide
cucccuccagacaaggaag

SEQ ID NO: 706 - RNA, 19 nt, Artificial Sequence
  Description of Artificial Sequence: Synthetic oligonucleotide
ucccuccagacaaggaaga

SEQ ID NO: 707 - RNA, 19 nt, Artificial Sequence
  Description of Artificial Sequence: Synthetic oligonucleotide
cccuccagacaaggaagag

SEQ ID NO: 708 - RNA, 19 nt, Artificial Sequence
  Description of Artificial Sequence: Synthetic oligonucleotide
ccuccagacaaggaagagu

SEQ ID NO: 709 - RNA, 19 nt, Artificial Sequence
  Description of Artificial Sequence: Synthetic oligonucleotide
cuccagacaaggaagaguc

SEQ ID NO: 710 - RNA, 19 nt, Artificial Sequence
  Description of Artificial Sequence: Synthetic oligonucleotide
uccagacaaggaagaguca

SEQ ID NO: 711 - RNA, 19 nt, Artificial Sequence
  Description of Artificial Sequence: Synthetic oligonucleotide
ccagacaaggaagagucag

SEQ ID NO: 712 - RNA, 19 nt, Artificial Sequence
  Description of Artificial Sequence: Synthetic oligonucleotide
cagacaaggaagagucagc

SEQ ID NO: 713 - RNA, 19 nt, Artificial Sequence
  Description of Artificial Sequence: Synthetic oligonucleotide
agacaaggaagagucagcc

SEQ ID NO: 714 - RNA, 19 nt, Artificial Sequence
  Description of Artificial Sequence: Synthetic oligonucleotide
gacaaggaagagucagccc

SEQ ID NO: 715 - RNA, 19 nt, Artificial Sequence
  Description of Artificial Sequence: Synthetic oligonucleotide
acaaggaagagucagcccc

SEQ ID NO: 716 - RNA, 19 nt, Artificial Sequence
  Description of Artificial Sequence: Synthetic oligonucleotide
caaggaagagucagccccu

SEQ ID NO: 717 - RNA, 19 nt, Artificial Sequence
  Description of Artificial Sequence: Synthetic oligonucleotide
aaggaagagucagccccug

SEQ ID NO: 718 - RNA, 19 nt, Artificial Sequence
  Description of Artificial Sequence: Synthetic oligonucleotide
aggaagagucagccccugc

SEQ ID NO: 719 - RNA, 19 nt, Artificial Sequence
  Description of Artificial Sequence: Synthetic oligonucleotide
ggaagagucagccccugcu

SEQ ID NO: 720 - RNA, 19 nt, Artificial Sequence
  Description of Artificial Sequence: Synthetic oligonucleotide
gaagagucagccccugcuc

SEQ ID NO: 721 - RNA, 19 nt, Artificial Sequence
  Description of Artificial Sequence: Synthetic oligonucleotide
aagagucagccccugcucc

SEQ ID NO: 722 - RNA, 19 nt, Artificial Sequence
  Description of Artificial Sequence: Synthetic oligonucleotide
agagucagccccugcuccu

SEQ ID NO: 723 - RNA, 19 nt, Artificial Sequence
  Description of Artificial Sequence: Synthetic oligonucleotide
gagucagccccugcuccug

SEQ ID NO: 724 - RNA, 19 nt, Artificial Sequence
  Description of Artificial Sequence: Synthetic oligonucleotide
agucagccccugcuccugg

SEQ ID NO: 725 - RNA, 19 nt, Artificial Sequence
  Description of Artificial Sequence: Synthetic oligonucleotide
gucagccccugcuccugga

SEQ ID NO: 726 - RNA, 19 nt, Artificial Sequence
  Description of Artificial Sequence: Synthetic oligonucleotide
ucagccccugcuccuggac

SEQ ID NO: 727 - RNA, 19 nt, Artificial Sequence
  Description of Artificial Sequence: Synthetic oligonucleotide
cagccccugcuccuggaca

SEQ ID NO: 728 - RNA, 19 nt, Artificial Sequence
  Description of Artificial Sequence: Synthetic oligonucleotide
agccccugcuccuggacac

SEQ ID NO: 729 - RNA, 19 nt, Artificial Sequence
  Description of Artificial Sequence: Synthetic oligonucleotide
gccccugcuccuggacacc

SEQ ID NO: 730 - RNA, 19 nt, Artificial Sequence
  Description of Artificial Sequence: Synthetic oligonucleotide
ccccugcuccuggacacca

SEQ ID NO: 731 - RNA, 19 nt, Artificial Sequence
  Description of Artificial Sequence: Synthetic oligonucleotide
cccugcuccuggacaccag

SEQ ID NO: 732 - RNA, 19 nt, Artificial Sequence
  Description of Artificial Sequence: Synthetic oligonucleotide
ccugcuccuggacaccagc

SEQ ID NO: 733 - RNA, 19 nt, Artificial Sequence
  Description of Artificial Sequence: Synthetic oligonucleotide
cugcuccuggacaccagca

SEQ ID NO: 734 - RNA, 19 nt, Artificial Sequence
  Description of Artificial Sequence: Synthetic oligonucleotide
ugcuccuggacaccagcaa

SEQ ID NO: 735 - RNA, 19 nt, Artificial Sequence
  Description of Artificial Sequence: Synthetic oligonucleotide
gcuccuggacaccagcaag

SEQ ID NO: 736 - RNA, 19 nt, Artificial Sequence
  Description of Artificial Sequence: Synthetic oligonucleotide
cuccuggacaccagcaagc

SEQ ID NO: 737 - RNA, 19 nt, Artificial Sequence
  Description of Artificial Sequence: Synthetic oligonucleotide
uccuggacaccagcaagcc

SEQ ID NO: 738 - RNA, 19 nt, Artificial Sequence
  Description of Artificial Sequence: Synthetic oligonucleotide
ccuggacaccagcaagccc

SEQ ID NO: 739 - RNA, 19 nt, Artificial Sequence
  Description of Artificial Sequence: Synthetic oligonucleotide
cuggacaccagcaagccca

SEQ ID NO: 740 - RNA, 19 nt, Artificial Sequence
  Description of Artificial Sequence: Synthetic oligonucleotide
uggacaccagcaagcccag

SEQ ID NO: 741 - RNA, 19 nt, Artificial Sequence
  Description of Artificial Sequence: Synthetic oligonucleotide
ggacaccagcaagcccaga

SEQ ID NO: 742 - RNA, 19 nt, Artificial Sequence
  Description of Artificial Sequence: Synthetic oligonucleotide
gacaccagcaagcccagaa

SEQ ID NO: 743 - RNA, 19 nt, Artificial Sequence
  Description of Artificial Sequence: Synthetic oligonucleotide
acaccagcaagcccagaag

SEQ ID NO: 744 - RNA, 19 nt, Artificial Sequence
  Description of Artificial Sequence: Synthetic oligonucleotide
caccagcaagcccagaagu

SEQ ID NO: 745 - RNA, 19 nt, Artificial Sequence
  Description of Artificial Sequence: Synthetic oligonucleotide
accagcaagcccagaaguc

SEQ ID NO: 746 - RNA, 19 nt, Artificial Sequence
  Description of Artificial Sequence: Synthetic oligonucleotide
ccagcaagcccagaagucu

SEQ ID NO: 747 - RNA, 19 nt, Artificial Sequence
  Description of Artificial Sequence: Synthetic oligonucleotide
cagcaagcccagaagucuc

SEQ ID NO: 748 - RNA, 19 nt, Artificial Sequence
  Description of Artificial Sequence: Synthetic oligonucleotide
agcaagcccagaagucucc

SEQ ID NO: 749 - RNA, 19 nt, Artificial Sequence
  Description of Artificial Sequence: Synthetic oligonucleotide
gcaagcccagaagucuccc

SEQ ID NO: 750 - RNA, 19 nt, Artificial Sequence
  Description of Artificial Sequence: Synthetic oligonucleotide
caagcccagaagucuccca

SEQ ID NO: 751 - RNA, 19 nt, Artificial Sequence
  Description of Artificial Sequence: Synthetic oligonucleotide
aagcccagaagucucccaa

SEQ ID NO: 752 - RNA, 19 nt, Artificial Sequence
  Description of Artificial Sequence: Synthetic oligonucleotide
agcccagaagucucccaag

SEQ ID NO: 753 - RNA, 19 nt, Artificial Sequence
  Description of Artificial Sequence: Synthetic oligonucleotide
gcccagaagucucccaagg

SEQ ID NO: 754 - RNA, 19 nt, Artificial Sequence
  Description of Artificial Sequence: Synthetic oligonucleotide
cccagaagucucccaaggc

SEQ ID NO: 755 - RNA, 19 nt, Artificial Sequence
  Description of Artificial Sequence: Synthetic oligonucleotide
ccagaagucucccaaggcc

SEQ ID NO: 756 - RNA, 19 nt, Artificial Sequence
  Description of Artificial Sequence: Synthetic oligonucleotide
cagaagucucccaaggcca

SEQ ID NO: 757 - RNA, 19 nt, Artificial Sequence
  Description of Artificial Sequence: Synthetic oligonucleotide
agaagucucccaaggccaa

SEQ ID NO: 758 - RNA, 19 nt, Artificial Sequence
  Description of Artificial Sequence: Synthetic oligonucleotide
gaagucucccaaggccaag

SEQ ID NO: 759 - RNA, 19 nt, Artificial Sequence
  Description of Artificial Sequence: Synthetic oligonucleotide
aagucucccaaggccaagc

SEQ ID NO: 760 - RNA, 19 nt, Artificial Sequence
  Description of Artificial Sequence: Synthetic oligonucleotide
agucucccaaggccaagcc

SEQ ID NO: 761 - RNA, 19 nt, Artificial Sequence
  Description of Artificial Sequence: Synthetic oligonucleotide
gucucccaaggccaagcca

SEQ ID NO: 762 - RNA, 19 nt, Artificial Sequence
  Description of Artificial Sequence: Synthetic oligonucleotide
ucucccaaggccaagccaa

SEQ ID NO: 763 - RNA, 19 nt, Artificial Sequence
  Description of Artificial Sequence: Synthetic oligonucleotide
cucccaaggccaagccaag

SEQ ID NO: 764 - RNA, 19 nt, Artificial Sequence
  Description of Artificial Sequence: Synthetic oligonucleotide
ucccaaggccaagccaagc

SEQ ID NO: 765 - RNA, 19 nt, Artificial Sequence
  Description of Artificial Sequence: Synthetic oligonucleotide
cccaaggccaagccaagcc

SEQ ID NO: 766 - RNA, 19 nt, Artificial Sequence
  Description of Artificial Sequence: Synthetic oligonucleotide
ccaaggccaagccaagccu

SEQ ID NO: 767 - RNA, 19 nt, Artificial Sequence
  Description of Artificial Sequence: Synthetic oligonucleotide
caaggccaagccaagccuc

SEQ ID NO: 768 - RNA, 19 nt, Artificial Sequence
  Description of Artificial Sequence: Synthetic oligonucleotide
aaggccaagccaagccucu

SEQ ID NO: 769 - RNA, 19 nt, Artificial Sequence
  Description of Artificial Sequence: Synthetic oligonucleotide
aggccaagccaagccucuu

SEQ ID NO: 770 - RNA, 19 nt, Artificial Sequence
  Description of Artificial Sequence: Synthetic oligonucleotide
ggccaagccaagccucuug

SEQ ID NO: 771 - RNA, 19 nt, Artificial Sequence
  Description of Artificial Sequence: Synthetic oligonucleotide
gccaagccaagccucuuga

SEQ ID NO: 772 - RNA, 19 nt, Artificial Sequence
  Description of Artificial Sequence: Synthetic oligonucleotide
ccaagccaagccucuugag

SEQ ID NO: 773 - RNA, 19 nt, Artificial Sequence
  Description of Artificial Sequence: Synthetic oligonucleotide
caagccaagccucuugagc

SEQ ID NO: 774 - RNA, 19 nt, Artificial Sequence
  Description of Artificial Sequence: Synthetic oligonucleotide
aagccaagccucuugagca

SEQ ID NO: 775 - RNA, 19 nt, Artificial Sequence
  Description of Artificial Sequence: Synthetic oligonucleotide
agccaagccucuugagcag

SEQ ID NO: 776 - RNA, 19 nt, Artificial Sequence
  Description of Artificial Sequence: Synthetic oligonucleotide
gccaagccucuugagcagg

SEQ ID NO: 777 - RNA, 19 nt, Artificial Sequence
  Description of Artificial Sequence: Synthetic oligonucleotide
ccaagccucuugagcaggg

SEQ ID NO: 778 - RNA, 19 nt, Artificial Sequence
  Description of Artificial Sequence: Synthetic oligonucleotide
caagccucuugagcagggu

SEQ ID NO: 779 - RNA, 19 nt, Artificial Sequence
  Description of Artificial Sequence: Synthetic oligonucleotide
aagccucuugagcaggguu

SEQ ID NO: 780 - RNA, 19 nt, Artificial Sequence
  Description of Artificial Sequence: Synthetic oligonucleotide
agccucuugagcaggguug

SEQ ID NO: 781 - RNA, 19 nt, Artificial Sequence
  Description of Artificial Sequence: Synthetic oligonucleotide
gccucuugagcaggguugg

SEQ ID NO: 782 - RNA, 19 nt, Artificial Sequence
  Description of Artificial Sequence: Synthetic oligonucleotide
ccucuugagcaggguuggg

SEQ ID NO: 783 - RNA, 19 nt, Artificial Sequence
  Description of Artificial Sequence: Synthetic oligonucleotide
cucuugagcaggguugggg

SEQ ID NO: 784 - RNA, 19 nt, Artificial Sequence
  Description of Artificial Sequence: Synthetic oligonucleotide
ucuugagcaggguuggggc

SEQ ID NO: 785 - RNA, 19 nt, Artificial Sequence
  Description of Artificial Sequence: Synthetic oligonucleotide
cuugagcaggguuggggcu

SEQ ID NO: 786 - RNA, 19 nt, Artificial Sequence
  Description of Artificial Sequence: Synthetic oligonucleotide
uugagcaggguuggggcuc

SEQ ID NO: 787 - RNA, 19 nt, Artificial Sequence
  Description of Artificial Sequence: Synthetic oligonucleotide
ugagcaggguuggggcucu

SEQ ID NO: 788 - RNA, 19 nt, Artificial Sequence
  Description of Artificial Sequence: Synthetic oligonucleotide
gagcaggguuggggcucug

SEQ ID NO: 789 - RNA, 19 nt, Artificial Sequence
  Description of Artificial Sequence: Synthetic oligonucleotide
agcaggguuggggcucuga

SEQ ID NO: 790 - RNA, 19 nt, Artificial Sequence
  Description of Artificial Sequence: Synthetic oligonucleotide
gcaggguuggggcucugac

SEQ ID NO: 791 - RNA, 19 nt, Artificial Sequence
  Description of Artificial Sequence: Synthetic oligonucleotide
caggguuggggcucugacc

SEQ ID NO: 792 - RNA, 19 nt, Artificial Sequence
  Description of Artificial Sequence: Synthetic oligonucleotide
aggguuggggcucugacca

SEQ ID NO: 793 - RNA, 19 nt, Artificial Sequence
  Description of Artificial Sequence: Synthetic oligonucleotide
ggguuggggcucugaccaa

SEQ ID NO: 794 - RNA, 19 nt, Artificial Sequence
  Description of Artificial Sequence: Synthetic oligonucleotide
gguuggggcucugaccaac

SEQ ID NO: 795 - RNA, 19 nt, Artificial Sequence
  Description of Artificial Sequence: Synthetic oligonucleotide
guuggggcucugaccaaca

SEQ ID NO: 796 - RNA, 19 nt, Artificial Sequence
  Description of Artificial Sequence: Synthetic oligonucleotide
uuggggcucugaccaacac

SEQ ID NO: 797 - RNA, 19 nt, Artificial Sequence
  Description of Artificial Sequence: Synthetic oligonucleotide
uggggcucugaccaacacc

SEQ ID NO: 798 - RNA, 19 nt, Artificial Sequence
  Description of Artificial Sequence: Synthetic oligonucleotide
ggggcucugaccaacaccc

SEQ ID NO: 799 - RNA, 19 nt, Artificial Sequence
  Description of Artificial Sequence: Synthetic oligonucleotide
gggcucugaccaacacccu

SEQ ID NO: 800 - RNA, 19 nt, Artificial Sequence
  Description of Artificial Sequence: Synthetic oligonucleotide
ggcucugaccaacacccuc

SEQ ID NO: 801 - RNA, 19 nt, Artificial Sequence
  Description of Artificial Sequence: Synthetic oligonucleotide
gcucugaccaacacccucu

SEQ ID NO: 802 - RNA, 19 nt, Artificial Sequence
  Description of Artificial Sequence: Synthetic oligonucleotide
cucugaccaacacccucuc

SEQ ID NO: 803 - RNA, 19 nt, Artificial Sequence
  Description of Artificial Sequence: Synthetic oligonucleotide
ucugaccaacacccucucu

SEQ ID NO: 804 - RNA, 19 nt, Artificial Sequence
  Description of Artificial Sequence: Synthetic oligonucleotide
cugaccaacacccucucuc

SEQ ID NO: 805 - RNA, 19 nt, Artificial Sequence
  Description of Artificial Sequence: Synthetic oligonucleotide
ugaccaacacccucucucg

SEQ ID NO: 806 - RNA, 19 nt, Artificial Sequence
  Description of Artificial Sequence: Synthetic oligonucleotide
gaccaacacccucucucga

SEQ ID NO: 807 - RNA, 19 nt, Artificial Sequence
  Description of Artificial Sequence: Synthetic oligonucleotide
accaacacccucucucgau

SEQ ID NO: 808 - RNA, 19 nt, Artificial Sequence
  Description of Artificial Sequence: Synthetic oligonucleotide
ccaacacccucucucgaua

SEQ ID NO: 809 - RNA, 19 nt, Artificial Sequence
  Description of Artificial Sequence: Synthetic oligonucleotide
caacacccucucucgauac

SEQ ID NO: 810 - RNA, 19 nt, Artificial Sequence
  Description of Artificial Sequence: Synthetic oligonucleotide
aacacccucucucgauaca

SEQ ID NO: 811 - RNA, 19 nt, Artificial Sequence
  Description of Artificial Sequence: Synthetic oligonucleotide
acacccucucucgauacac

SEQ ID NO: 812 - RNA, 19 nt, Artificial Sequence
  Description of Artificial Sequence: Synthetic oligonucleotide
cacccucucucgauacacc

SEQ ID NO: 813 - RNA, 19 nt, Artificial Sequence
  Description of Artificial Sequence: Synthetic oligonucleotide
acccucucucgauacaccg

SEQ ID NO: 814 - RNA, 19 nt, Artificial Sequence
  Description of Artificial Sequence: Synthetic oligonucleotide
cccucucucgauacaccgu

SEQ ID NO: 815 - RNA, 19 nt, Artificial Sequence
  Description of Artificial Sequence: Synthetic oligonucleotide
ccucucucgauacaccgug

SEQ ID NO: 816 - RNA, 19 nt, Artificial Sequence
  Description of Artificial Sequence: Synthetic oligonucleotide
cucucucgauacaccgugc

SEQ ID NO: 817 - RNA, 19 nt, Artificial Sequence
  Description of Artificial Sequence: Synthetic oligonucleotide
ucucucgauacaccgugca

SEQ ID NO: 818 - RNA, 19 nt, Artificial Sequence
  Description of Artificial Sequence: Synthetic oligonucleotide
cucucgauacaccgugcag

SEQ ID NO: 819 - RNA, 19 nt, Artificial Sequence
  Description of Artificial Sequence: Synthetic oligonucleotide
ucucgauacaccgugcaga

SEQ ID NO: 820 - RNA, 19 nt, Artificial Sequence
  Description of Artificial Sequence: Synthetic oligonucleotide
cucgauacaccgugcagac

SEQ ID NO: 821 - RNA, 19 nt, Artificial Sequence
  Description of Artificial Sequence: Synthetic oligonucleotide
ucgauacaccgugcagacc

SEQ ID NO: 822 - RNA, 19 nt, Artificial Sequence
  Description of Artificial Sequence: Synthetic oligonucleotide
cgauacaccgugcagacca

SEQ ID NO: 823 - RNA, 19 nt, Artificial Sequence
  Description of Artificial Sequence: Synthetic oligonucleotide
gauacaccgugcagaccau

SEQ ID NO: 824 - RNA, 19 nt, Artificial Sequence
  Description of Artificial Sequence: Synthetic oligonucleotide
auacaccgugcagaccaug

SEQ ID NO: 825 - RNA, 19 nt, Artificial Sequence
  Description of Artificial Sequence: Synthetic oligonucleotide
uacaccgugcagaccaugg

SEQ ID NO: 826 - RNA, 19 nt, Artificial Sequence
  Description of Artificial Sequence: Synthetic oligonucleotide
acaccgugcagaccauggc

SEQ ID NO: 827 - RNA, 19 nt, Artificial Sequence
  Description of Artificial Sequence: Synthetic oligonucleotide
caccgugcagaccauggcc

SEQ ID NO: 828 - RNA, 19 nt, Artificial Sequence
  Description of Artificial Sequence: Synthetic oligonucleotide
accgugcagaccauggccc

SEQ ID NO: 829 - RNA, 19 nt, Artificial Sequence
  Description of Artificial Sequence: Synthetic oligonucleotide
ccgugcagaccauggcccg

SEQ ID NO: 830 - RNA, 19 nt, Artificial Sequence
  Description of Artificial Sequence: Synthetic oligonucleotide
cgugcagaccauggcccgg

SEQ ID NO: 831 - RNA, 19 nt, Artificial Sequence
  Description of Artificial Sequence: Synthetic oligonucleotide
gugcagaccauggcccggg

SEQ ID NO: 832 - RNA, 19 nt, Artificial Sequence
  Description of Artificial Sequence: Synthetic oligonucleotide
ugcagaccauggcccgggc

SEQ ID NO: 833 - RNA, 19 nt, Artificial Sequence
  Description of Artificial Sequence: Synthetic oligonucleotide
gcagaccauggcccgggcc

SEQ ID NO: 834 - RNA, 19 nt, Artificial Sequence
  Description of Artificial Sequence: Synthetic oligonucleotide
cagaccauggcccgggccc

SEQ ID NO: 835 - RNA, 19 nt, Artificial Sequence
  Description of Artificial Sequence: Synthetic oligonucleotide
agaccauggcccgggcccu

SEQ ID NO: 836 - RNA, 19 nt, Artificial Sequence
  Description of Artificial Sequence: Synthetic oligonucleotide
gaccauggcccgggcccug

SEQ ID NO: 837 - RNA, 19 nt, Artificial Sequence
  Description of Artificial Sequence: Synthetic oligonucleotide
accauggcccgggcccugg

SEQ ID NO: 838 - RNA, 19 nt, Artificial Sequence
  Description of Artificial Sequence: Synthetic oligonucleotide
ccauggcccgggcccugga

SEQ ID NO: 839 - RNA, 19 nt, Artificial Sequence
  Description of Artificial Sequence: Synthetic oligonucleotide
cauggcccgggcccuggag

SEQ ID NO: 840 - RNA, 19 nt, Artificial Sequence
  Description of Artificial Sequence: Synthetic oligonucleotide
auggcccgggcccuggagc

SEQ ID NO: 841 - RNA, 19 nt, Artificial Sequence
  Description of Artificial Sequence: Synthetic oligonucleotide
uggcccgggcccuggagca

SEQ ID NO: 842 - RNA, 19 nt, Artificial Sequence
  Description of Artificial Sequence: Synthetic oligonucleotide
ggcccgggcccuggagcag

SEQ ID NO: 843 - RNA, 19 nt, Artificial Sequence
  Description of Artificial Sequence: Synthetic oligonucleotide
gcccgggcccuggagcagg

SEQ ID NO: 844 - RNA, 19 nt, Artificial Sequence
  Description of Artificial Sequence: Synthetic oligonucleotide
cccgggcccuggagcaggg

SEQ ID NO: 845 - RNA, 19 nt, Artificial Sequence
  Description of Artificial Sequence: Synthetic oligonucleotide
ccgggcccuggagcagggc

SEQ ID NO: 846 - RNA, 19 nt, Artificial Sequence
  Description of Artificial Sequence: Synthetic oligonucleotide
cgggcccuggagcagggcc

SEQ ID NO: 847 - RNA, 19 nt, Artificial Sequence
  Description of Artificial Sequence: Synthetic oligonucleotide
gggcccuggagcagggcca

SEQ ID NO: 848 - RNA, 19 nt, Artificial Sequence
  Description of Artificial Sequence: Synthetic oligonucleotide
ggcccuggagcagggccac

SEQ ID NO: 849 - RNA, 19 nt, Artificial Sequence
  Description of Artificial Sequence: Synthetic oligonucleotide
gcccuggagcagggccaca

SEQ ID NO: 850 - RNA, 19 nt, Artificial Sequence
  Description of Artificial Sequence: Synthetic oligonucleotide
cccuggagcagggccacac

SEQ ID NO: 851 - RNA, 19 nt, Artificial Sequence
  Description of Artificial Sequence: Synthetic oligonucleotide
ccuggagcagggccacacc

SEQ ID NO: 852 - RNA, 19 nt, Artificial Sequence
  Description of Artificial Sequence: Synthetic oligonucleotide
cuggagcagggccacaccg

SEQ ID NO: 853 - RNA, 19 nt, Artificial Sequence
  Description of Artificial Sequence: Synthetic oligonucleotide
uggagcagggccacaccgu

SEQ ID NO: 854 - RNA, 19 nt, Artificial Sequence
  Description of Artificial Sequence: Synthetic oligonucleotide
ggagcagggccacaccgug

SEQ ID NO: 855 - RNA, 19 nt, Artificial Sequence
  Description of Artificial Sequence: Synthetic oligonucleotide
gagcagggccacaccgugg

SEQ ID NO: 856 - RNA, 19 nt, Artificial Sequence
  Description of Artificial Sequence: Synthetic oligonucleotide
agcagggccacaccguggc

SEQ ID NO: 857 - RNA, 19 nt, Artificial Sequence
  Description of Artificial Sequence: Synthetic oligonucleotide
gcagggccacaccguggcc

SEQ ID NO: 858 - RNA, 19 nt, Artificial Sequence
  Description of Artificial Sequence: Synthetic oligonucleotide
cagggccacaccguggcca

SEQ ID NO: 859 - RNA, 19 nt, Artificial Sequence
  Description of Artificial Sequence: Synthetic oligonucleotide
agggccacaccguggccau

SEQ ID NO: 860 - RNA, 19 nt, Artificial Sequence
  Description of Artificial Sequence: Synthetic oligonucleotide
gggccacaccguggccaug

SEQ ID NO: 861 - RNA, 19 nt, Artificial Sequence
  Description of Artificial Sequence: Synthetic oligonucleotide
ggccacaccguggccaugu

SEQ ID NO: 862 - RNA, 19 nt, Artificial Sequence
  Description of Artificial Sequence: Synthetic oligonucleotide
gccacaccguggccaugug

SEQ ID NO: 863 - RNA, 19 nt, Artificial Sequence
  Description of Artificial Sequence: Synthetic oligonucleotide
ccacaccguggccaugugg

SEQ ID NO: 864 - RNA, 19 nt, Artificial Sequence
  Description of Artificial Sequence: Synthetic oligonucleotide
cacaccguggccaugugga

SEQ ID NO: 865 - RNA, 19 nt, Artificial Sequence
  Description of Artificial Sequence: Synthetic oligonucleotide
acaccguggccauguggau

SEQ ID NO: 866 - RNA, 19 nt, Artificial Sequence
  Description of Artificial Sequence: Synthetic oligonucleotide
caccguggccauguggauc

SEQ ID NO: 867 - RNA, 19 nt, Artificial Sequence
  Description of Artificial Sequence: Synthetic oligonucleotide
accguggccauguggaucc

SEQ ID NO: 868 - RNA, 19 nt, Artificial Sequence
  Description of Artificial Sequence: Synthetic oligonucleotide
ccguggccauguggauccc

SEQ ID NO: 869 - RNA, 19 nt, Artificial Sequence
  Description of Artificial Sequence: Synthetic oligonucleotide
cguggccauguggauccca

SEQ ID NO: 870 - RNA, 19 nt, Artificial Sequence
  Description of Artificial Sequence: Synthetic oligonucleotide
guggccauguggaucccag

SEQ ID NO: 871 - RNA, 19 nt, Artificial Sequence
  Description of Artificial Sequence: Synthetic oligonucleotide
uggccauguggaucccagg

SEQ ID NO: 872 - RNA, 19 nt, Artificial Sequence
  Description of Artificial Sequence: Synthetic oligonucleotide
ggccauguggaucccaggc

SEQ ID NO: 873 - RNA, 19 nt, Artificial Sequence
  Description of Artificial Sequence: Synthetic oligonucleotide
gccauguggaucccaggcg

SEQ ID NO: 874 - RNA, 19 nt, Artificial Sequence
  Description of Artificial Sequence: Synthetic oligonucleotide
ccauguggaucccaggcgu

SEQ ID NO: 875 - RNA, 19 nt, Artificial Sequence
  Description of Artificial Sequence: Synthetic oligonucleotide
cauguggaucccaggcgug

SEQ ID NO: 876 - RNA, 19 nt, Artificial Sequence
  Description of Artificial Sequence: Synthetic oligonucleotide
auguggaucccaggcgugg

SEQ ID NO: 877 - RNA, 19 nt, Artificial Sequence
  Description of Artificial Sequence: Synthetic oligonucleotide
uguggaucccaggcguggu

SEQ ID NO: 878 - RNA, 19 nt, Artificial Sequence
  Description of Artificial Sequence: Synthetic oligonucleotide
guggaucccaggcguggug

SEQ ID NO: 879 - RNA, 19 nt, Artificial Sequence
  Description of Artificial Sequence: Synthetic oligonucleotide
uggaucccaggcguggugc

SEQ ID NO: 880 - RNA, 19 nt, Artificial Sequence
  Description of Artificial Sequence: Synthetic oligonucleotide
ggaucccaggcguggugcc

SEQ ID NO: 881 - RNA, 19 nt, Artificial Sequence
  Description of Artificial Sequence: Synthetic oligonucleotide
gaucccaggcguggugccc

SEQ ID NO: 882 - RNA, 19 nt, Artificial Sequence
  Description of Artificial Sequence: Synthetic oligonucleotide
aucccaggcguggugcccc

SEQ ID NO: 883 - RNA, 19 nt, Artificial Sequence
  Description of Artificial Sequence: Synthetic oligonucleotide
ucccaggcguggugccccu

SEQ ID NO: 884 - RNA, 19 nt, Artificial Sequence
  Description of Artificial Sequence: Synthetic oligonucleotide
cccaggcguggugccccug

SEQ ID NO: 885 - RNA, 19 nt, Artificial Sequence
  Description of Artificial Sequence: Synthetic oligonucleotide
ccaggcguggugccccuga

SEQ ID NO: 886 - RNA, 19 nt, Artificial Sequence
  Description of Artificial Sequence: Synthetic oligonucleotide
caggcguggugccccugag

SEQ ID NO: 887 - RNA, 19 nt, Artificial Sequence
  Description of Artificial Sequence: Synthetic oligonucleotide
aggcguggugccccugagc

SEQ ID NO: 888 - RNA, 19 nt, Artificial Sequence
  Description of Artificial Sequence: Synthetic oligonucleotide
ggcguggugccccugagca

SEQ ID NO: 889 - RNA, 19 nt, Artificial Sequence
  Description of Artificial Sequence: Synthetic oligonucleotide
gcguggugccccugagcag

SEQ ID NO: 890 - RNA, 19 nt, Artificial Sequence
  Description of Artificial Sequence: Synthetic oligonucleotide
cguggugccccugagcagc

SEQ ID NO: 891 - RNA, 19 nt, Artificial Sequence
  Description of Artificial Sequence: Synthetic oligonucleotide
guggugccccugagcagcc

SEQ ID NO: 892 - RNA, 19 nt, Artificial Sequence
  Description of Artificial Sequence: Synthetic oligonucleotide
uggugccccugagcagccu

SEQ ID NO: 893 - RNA, 19 nt, Artificial Sequence
  Description of Artificial Sequence: Synthetic oligonucleotide
ggugccccugagcagccug

SEQ ID NO: 894 - RNA, 19 nt, Artificial Sequence
  Description of Artificial Sequence: Synthetic oligonucleotide
gugccccugagcagccugg

SEQ ID NO: 895 - RNA, 19 nt, Artificial Sequence
  Description of Artificial Sequence: Synthetic oligonucleotide
ugccccugagcagccuggc

SEQ ID NO: 896 - RNA, 19 nt, Artificial Sequence
  Description of Artificial Sequence: Synthetic oligonucleotide
gccccugagcagccuggcc

SEQ ID NO: 897 - RNA, 19 nt, Artificial Sequence
  Description of Artificial Sequence: Synthetic oligonucleotide
ccccugagcagccuggccc

SEQ ID NO: 898 - RNA, 19 nt, Artificial Sequence
  Description of Artificial Sequence: Synthetic oligonucleotide
cccugagcagccuggccca

SEQ ID NO: 899 - RNA, 19 nt, Artificial Sequence
  Description of Artificial Sequence: Synthetic oligonucleotide
ccugagcagccuggcccag

SEQ ID NO: 900 - RNA, 19 nt, Artificial Sequence
  Description of Artificial Sequence: Synthetic oligonucleotide
cugagcagccuggcccagu

SEQ ID NO: 901 - RNA, 19 nt, Artificial Sequence
  Description of Artificial Sequence: Synthetic oligonucleotide
ugagcagccuggcccagug

SEQ ID NO: 902 - RNA, 19 nt, Artificial Sequence
  Description of Artificial Sequence: Synthetic oligonucleotide
gagcagccuggcccagugg

SEQ ID NO: 903 - RNA, 19 nt, Artificial Sequence
  Description of Artificial Sequence: Synthetic oligonucleotide
agcagccuggcccaguggg

SEQ ID NO: 904 - RNA, 19 nt, Artificial Sequence
  Description of Artificial Sequence: Synthetic oligonucleotide
gcagccuggcccagugggg

SEQ ID NO: 905 - RNA, 19 nt, Artificial Sequence
  Description of Artificial Sequence: Synthetic oligonucleotide
cagccuggcccaguggggu

SEQ ID NO: 906 - RNA, 19 nt, Artificial Sequence
  Description of Artificial Sequence: Synthetic oligonucleotide
agccuggcccaguggggug

SEQ ID NO: 907 - RNA, 19 nt, Artificial Sequence
  Description of Artificial Sequence: Synthetic oligonucleotide
gccuggcccaguggggugc

SEQ ID NO: 908 - RNA, 19 nt, Artificial Sequence
  Description of Artificial Sequence: Synthetic oligonucleotide
ccuggcccaguggggugcc

SEQ ID NO: 909 - RNA, 19 nt, Artificial Sequence
  Description of Artificial Sequence: Synthetic oligonucleotide
cuggcccaguggggugccu

SEQ ID NO: 910 - RNA, 19 nt, Artificial Sequence
  Description of Artificial Sequence: Synthetic oligonucleotide
uggcccaguggggugccuc

SEQ ID NO: 911 - RNA, 19 nt, Artificial Sequence
  Description of Artificial Sequence: Synthetic oligonucleotide
ggcccaguggggugccuca

SEQ ID NO: 912 - RNA, 19 nt, Artificial Sequence
  Description of Artificial Sequence: Synthetic oligonucleotide
gcccaguggggugccucag

SEQ ID NO: 913 - RNA, 19 nt, Artificial Sequence
  Description of Artificial Sequence: Synthetic oligonucleotide
cccaguggggugccucagu

SEQ ID NO: 914 - RNA, 19 nt, Artificial Sequence
  Description of Artificial Sequence: Synthetic oligonucleotide
ccaguggggugccucagug

SEQ ID NO: 915 - RNA, 19 nt, Artificial Sequence
  Description of Artificial Sequence: Synthetic oligonucleotide
caguggggugccucagugg

SEQ ID NO: 916 - RNA, 19 nt, Artificial Sequence
  Description of Artificial Sequence: Synthetic oligonucleotide
aguggggugccucaguggc

SEQ ID NO: 917 - RNA, 19 nt, Artificial Sequence
  Description of Artificial Sequence: Synthetic oligonucleotide
guggggugccucaguggcc

SEQ ID NO: 918 - RNA, 19 nt, Artificial Sequence
  Description of Artificial Sequence: Synthetic oligonucleotide
uggggugccucaguggcca

SEQ ID NO: 919 - RNA, 19 nt, Artificial Sequence
  Description of Artificial Sequence: Synthetic oligonucleotide
ggggugccucaguggccau

SEQ ID NO: 920 - RNA, 19 nt, Artificial Sequence
  Description of Artificial Sequence: Synthetic oligonucleotide
gggugccucaguggccaug

SEQ ID NO: 921 - RNA, 19 nt, Artificial Sequence
  Description of Artificial Sequence: Synthetic oligonucleotide
ggugccucaguggccaugc

SEQ ID NO: 922 - RNA, 19 nt, Artificial Sequence
  Description of Artificial Sequence: Synthetic oligonucleotide
gugccucaguggccaugca

SEQ ID NO: 923 - RNA, 19 nt, Artificial Sequence
  Description of Artificial Sequence: Synthetic oligonucleotide
ugccucaguggccaugcag

SEQ ID NO: 924 - RNA, 19 nt, Artificial Sequence
  Description of Artificial Sequence: Synthetic oligonucleotide
gccucaguggccaugcagg

SEQ ID NO: 925 - RNA, 19 nt, Artificial Sequence
  Description of Artificial Sequence: Synthetic oligonucleotide
ccucaguggccaugcaggc

SEQ ID NO: 926 - RNA, 19 nt, Artificial Sequence
  Description of Artificial Sequence: Synthetic oligonucleotide
cucaguggccaugcaggcg

SEQ ID NO: 927 - RNA, 19 nt, Artificial Sequence
  Description of Artificial Sequence: Synthetic oligonucleotide
ucaguggccaugcaggcgg

SEQ ID NO: 928 - RNA, 19 nt, Artificial Sequence
  Description of Artificial Sequence: Synthetic oligonucleotide
caguggccaugcaggcggu

SEQ ID NO: 929 - RNA, 19 nt, Artificial Sequence
  Description of Artificial Sequence: Synthetic oligonucleotide
aguggccaugcaggcggug

SEQ ID NO: 930 - RNA, 19 nt, Artificial Sequence
  Description of Artificial Sequence: Synthetic oligonucleotide
guggccaugcaggcggugu

SEQ ID NO: 931 - RNA, 19 nt, Artificial Sequence
  Description of Artificial Sequence: Synthetic oligonucleotide
uggccaugcaggcgguguc

SEQ ID NO: 932 - RNA, 19 nt, Artificial Sequence
  Description of Artificial Sequence: Synthetic oligonucleotide
ggccaugcaggcggugucc

SEQ ID NO: 933 - RNA, 19 nt, Artificial Sequence
  Description of Artificial Sequence: Synthetic oligonucleotide
gccaugcaggcgguguccc

SEQ ID NO: 934 - RNA, 19 nt, Artificial Sequence
  Description of Artificial Sequence: Synthetic oligonucleotide
ccaugcaggcggugucccg

SEQ ID NO: 935 - RNA, 19 nt, Artificial Sequence
  Description of Artificial Sequence: Synthetic oligonucleotide
caugcaggcggugucccgg

SEQ ID NO: 936 - RNA, 19 nt, Artificial Sequence
  Description of Artificial Sequence: Synthetic oligonucleotide
augcaggcggugucccggc

SEQ ID NO: 937 - RNA, 19 nt, Artificial Sequence
  Description of Artificial Sequence: Synthetic oligonucleotide
ugcaggcggugucccggcg

SEQ ID NO: 938 - RNA, 19 nt, Artificial Sequence
  Description of Artificial Sequence: Synthetic oligonucleotide
gcaggcggugucccggcgg

SEQ ID NO: 939 - RNA, 19 nt, Artificial Sequence
  Description of Artificial Sequence: Synthetic oligonucleotide
caggcggugucccggcgga

SEQ ID NO: 940 - RNA, 19 nt, Artificial Sequence
  Description of Artificial Sequence: Synthetic oligonucleotide
aggcggugucccggcggag

SEQ ID NO: 941 - RNA, 19 nt, Artificial Sequence
  Description of Artificial Sequence: Synthetic oligonucleotide
ggcggugucccggcggagg

SEQ ID NO: 942 - RNA, 19 nt, Artificial Sequence
  Description of Artificial Sequence: Synthetic oligonucleotide
gcggugucccggcggagga

SEQ ID NO: 943 - RNA, 19 nt, Artificial Sequence
  Description of Artificial Sequence: Synthetic oligonucleotide
cggugucccggcggaggag

SEQ ID NO: 944 - RNA, 19 nt, Artificial Sequence
  Description of Artificial Sequence: Synthetic oligonucleotide
ggugucccggcggaggagc

SEQ ID NO: 945 - RNA, 19 nt, Artificial Sequence
  Description of Artificial Sequence: Synthetic oligonucleotide
gugucccggcggaggagcg

SEQ ID NO: 946 - RNA, 19 nt, Artificial Sequence
  Description of Artificial Sequence: Synthetic oligonucleotide
ugucccggcggaggagcga

SEQ ID NO: 947 - RNA, 19 nt, Artificial Sequence
  Description of Artificial Sequence: Synthetic oligonucleotide
gucccggcggaggagcgaa

SEQ ID NO: 948 - RNA, 19 nt, Artificial Sequence
  Description of Artificial Sequence: Synthetic oligonucleotide
ucccggcggaggagcgaag

SEQ ID NO: 949 - RNA, 19 nt, Artificial Sequence
  Description of Artificial Sequence: Synthetic oligonucleotide
cccggcggaggagcgaagu

SEQ ID NO: 950 - RNA, 19 nt, Artificial Sequence
  Description of Artificial Sequence: Synthetic oligonucleotide
ccggcggaggagcgaagug

SEQ ID NO: 951 - RNA, 19 nt, Artificial Sequence
  Description of Artificial Sequence: Synthetic oligonucleotide
cggcggaggagcgaagugc

SEQ ID NO: 952 - RNA, 19 nt, Artificial Sequence
  Description of Artificial Sequence: Synthetic oligonucleotide
ggcggaggagcgaagugcg

SEQ ID NO: 953 - RNA, 19 nt, Artificial Sequence
  Description of Artificial Sequence: Synthetic oligonucleotide
gcggaggagcgaagugcgg

SEQ ID NO: 954 - RNA, 19 nt, Artificial Sequence
  Description of Artificial Sequence: Synthetic oligonucleotide
cggaggagcgaagugcggg

SEQ ID NO: 955 - RNA, 19 nt, Artificial Sequence
  Description of Artificial Sequence: Synthetic oligonucleotide
ggaggagcgaagugcgggu

SEQ ID NO: 956 - RNA, 19 nt, Artificial Sequence
  Description of Artificial Sequence: Synthetic oligonucleotide
gaggagcgaagugcgggua

SEQ ID NO: 957 - RNA, 19 nt, Artificial Sequence
  Description of Artificial Sequence: Synthetic oligonucleotide
aggagcgaagugcggguac

SEQ ID NO: 958 - RNA, 19 nt, Artificial Sequence
  Description of Artificial Sequence: Synthetic oligonucleotide
ggagcgaagugcggguacc

SEQ ID NO: 959 - RNA, 19 nt, Artificial Sequence
  Description of Artificial Sequence: Synthetic oligonucleotide
gagcgaagugcggguaccc

SEQ ID NO: 960 - RNA, 19 nt, Artificial Sequence
  Description of Artificial Sequence: Synthetic oligonucleotide
agcgaagugcggguacccu

SEQ ID NO: 961 - RNA, 19 nt, Artificial Sequence
  Description of Artificial Sequence: Synthetic oligonucleotide
gcgaagugcggguacccug

SEQ ID NO: 962 - RNA, 19 nt, Artificial Sequence
  Description of Artificial Sequence: Synthetic oligonucleotide
cgaagugcggguacccugg

SEQ ID NO: 963 - RNA, 19 nt, Artificial Sequence
  Description of Artificial Sequence: Synthetic oligonucleotide
gaagugcggguacccuggc

SEQ ID NO: 964 - RNA, 19 nt, Artificial Sequence
  Description of Artificial Sequence: Synthetic oligonucleotide
aagugcggguacccuggcu

SEQ ID NO: 965 - RNA, 19 nt, Artificial Sequence
  Description of Artificial Sequence: Synthetic oligonucleotide
agugcggguacccuggcug

SEQ ID NO: 966 - RNA, 19 nt, Artificial Sequence
  Description of Artificial Sequence: Synthetic oligonucleotide
gugcggguacccuggcugc

SEQ ID NO: 967 - RNA, 19 nt, Artificial Sequence
  Description of Artificial Sequence: Synthetic oligonucleotide
ugcggguacccuggcugca

SEQ ID NO: 968 - RNA, 19 nt, Artificial Sequence
  Description of Artificial Sequence: Synthetic oligonucleotide
gcggguacccuggcugcac

SEQ ID NO: 969 - RNA, 19 nt, Artificial Sequence
  Description of Artificial Sequence: Synthetic oligonucleotide
cggguacccuggcugcaca

SEQ ID NO: 970 - RNA, 19 nt, Artificial Sequence
  Description of Artificial Sequence: Synthetic oligonucleotide
ggguacccuggcugcacag

SEQ ID NO: 971 - RNA, 19 nt, Artificial Sequence
  Description of Artificial Sequence: Synthetic oligonucleotide
gguacccuggcugcacagc

SEQ ID NO: 972 - RNA, 19 nt, Artificial Sequence
  Description of Artificial Sequence: Synthetic oligonucleotide
guacccuggcugcacagcc

SEQ ID NO: 973 - RNA, 19 nt, Artificial Sequence
  Description of Artificial Sequence: Synthetic oligonucleotide
uacccuggcugcacagccu

SEQ ID NO: 974 - RNA, 19 nt, Artificial Sequence
  Description of Artificial Sequence: Synthetic oligonucleotide
acccuggcugcacagccuc

SEQ ID NO: 975 - RNA, 19 nt, Artificial Sequence
  Description of Artificial Sequence: Synthetic oligonucleotide
cccuggcugcacagccucg

SEQ ID NO: 976 - RNA, 19 nt, Artificial Sequence
  Description of Artificial Sequence: Synthetic oligonucleotide
ccuggcugcacagccucgc

SEQ ID NO: 977 - RNA, 19 nt, Artificial Sequence
  Description of Artificial Sequence: Synthetic oligonucleotide
cuggcugcacagccucgca

SEQ ID NO: 978 - RNA, 19 nt, Artificial Sequence
  Description of Artificial Sequence: Synthetic oligonucleotide
uggcugcacagccucgcag

SEQ ID NO: 979 - RNA, 19 nt, Artificial Sequence
  Description of Artificial Sequence: Synthetic oligonucleotide
ggcugcacagccucgcagc

SEQ ID NO: 980 - RNA, 19 nt, Artificial Sequence
  Description of Artificial Sequence: Synthetic oligonucleotide
gcugcacagccucgcagcc

SEQ ID NO: 981 - RNA, 19 nt, Artificial Sequence
  Description of Artificial Sequence: Synthetic oligonucleotide
cugcacagccucgcagccg

SEQ ID NO: 982 - RNA, 19 nt, Artificial Sequence
  Description of Artificial Sequence: Synthetic oligonucleotide
ugcacagccucgcagccgc

SEQ ID NO: 983 - RNA, 19 nt, Artificial Sequence
  Description of Artificial Sequence: Synthetic oligonucleotide
gcacagccucgcagccgcc

SEQ ID NO: 984 - RNA, 19 nt, Artificial Sequence
  Description of Artificial Sequence: Synthetic oligonucleotide
cacagccucgcagccgccc

SEQ ID NO: 985 - RNA, 19 nt, Artificial Sequence
  Description of Artificial Sequence: Synthetic oligonucleotide
acagccucgcagccgccca

SEQ ID NO: 986 - RNA, 19 nt, Artificial Sequence
  Description of Artificial Sequence: Synthetic oligonucleotide
cagccucgcagccgcccag

SEQ ID NO: 987 - RNA, 19 nt, Artificial Sequence
  Description of Artificial Sequence: Synthetic oligonucleotide
agccucgcagccgcccagg

SEQ ID NO: 988 - RNA, 19 nt, Artificial Sequence
  Description of Artificial Sequence: Synthetic oligonucleotide
gccucgcagccgcccagga

SEQ ID NO: 989 - RNA, 19 nt, Artificial Sequence
  Description of Artificial Sequence: Synthetic oligonucleotide
ccucgcagccgcccaggag

SEQ ID NO: 990 - RNA, 19 nt, Artificial Sequence
  Description of Artificial Sequence: Synthetic oligonucleotide
cucgcagccgcccaggagg

SEQ ID NO: 991 - RNA, 19 nt, Artificial Sequence
  Description of Artificial Sequence: Synthetic oligonucleotide
ucgcagccgcccaggagga

SEQ ID NO: 992 - RNA, 19 nt, Artificial Sequence
  Description of Artificial Sequence: Synthetic oligonucleotide
cgcagccgcccaggaggag

SEQ ID NO: 993 - RNA, 19 nt, Artificial Sequence
  Description of Artificial Sequence: Synthetic oligonucleotide
gcagccgcccaggaggagg

SEQ ID NO: 994 - RNA, 19 nt, Artificial Sequence
  Description of Artificial Sequence: Synthetic oligonucleotide
cagccgcccaggaggagga

SEQ ID NO: 995 - RNA, 19 nt, Artificial Sequence
  Description of Artificial Sequence: Synthetic oligonucleotide
agccgcccaggaggaggau

SEQ ID NO: 996 - RNA, 19 nt, Artificial Sequence
  Description of Artificial Sequence: Synthetic oligonucleotide
gccgcccaggaggaggauc

SEQ ID NO: 997 - RNA, 19 nt, Artificial Sequence
  Description of Artificial Sequence: Synthetic oligonucleotide
ccgcccaggaggaggauca

SEQ ID NO: 998 - RNA, 19 nt, Artificial Sequence
  Description of Artificial Sequence: Synthetic oligonucleotide
cgcccaggaggaggaucau

SEQ ID NO: 999 - RNA, 19 nt, Artificial Sequence
  Description of Artificial Sequence: Synthetic oligonucleotide
gcccaggaggaggaucaug

SEQ ID NO: 1000 - RNA, 19 nt, Artificial Sequence
  Description of Artificial Sequence: Synthetic oligonucleotide
cccaggaggaggaucauga

SEQ ID NO: 1001 - RNA, 19 nt, Artificial Sequence
  Description of Artificial Sequence: Synthetic oligonucleotide
ccaggaggaggaucaugag

SEQ ID NO: 1002 - RNA, 19 nt, Artificial Sequence
  Description of Artificial Sequence: Synthetic oligonucleotide
caggaggaggaucaugagg

SEQ ID NO: 1003 - RNA, 19 nt, Artificial Sequence
  Description of Artificial Sequence: Synthetic oligonucleotide
aggaggaggaucaugagga

SEQ ID NO: 1004 - RNA, 19 nt, Artificial Sequence
  Description of Artificial Sequence: Synthetic oligonucleotide
ggaggaggaucaugaggac

SEQ ID NO: 1005 - RNA, 19 nt, Artificial Sequence
  Description of Artificial Sequence: Synthetic oligonucleotide
gaggaggaucaugaggacc

SEQ ID NO: 1006 - RNA, 19 nt, Artificial Sequence
  Description of Artificial Sequence: Synthetic oligonucleotide
aggaggaucaugaggacca

SEQ ID NO: 1007 - RNA, 19 nt, Artificial Sequence
  Description of Artificial Sequence: Synthetic oligonucleotide
ggaggaucaugaggaccag

SEQ ID NO: 1008 - RNA, 19 nt, Artificial Sequence
  Description of Artificial Sequence: Synthetic oligonucleotide
gaggaucaugaggaccaga

SEQ ID NO: 1009 - RNA, 19 nt, Artificial Sequence
  Description of Artificial Sequence: Synthetic oligonucleotide
aggaucaugaggaccagac

SEQ ID NO: 1010 - RNA, 19 nt, Artificial Sequence
  Description of Artificial Sequence: Synthetic oligonucleotide
ggaucaugaggaccagaca

SEQ ID NO: 1011 - RNA, 19 nt, Artificial Sequence
  Description of Artificial Sequence: Synthetic oligonucleotide
gaucaugaggaccagacag

SEQ ID NO: 1012 - RNA, 19 nt, Artificial Sequence
  Description of Artificial Sequence: Synthetic oligonucleotide
aucaugaggaccagacaga

SEQ ID NO: 1013 - RNA, 19 nt, Artificial Sequence
  Description of Artificial Sequence: Synthetic oligonucleotide
ucaugaggaccagacagac

SEQ ID NO: 1014 - RNA, 19 nt, Artificial Sequence
  Description of Artificial Sequence: Synthetic oligonucleotide
caugaggaccagacagaca

SEQ ID NO: 1015 - RNA, 19 nt, Artificial Sequence
  Description of Artificial Sequence: Synthetic oligonucleotide
augaggaccagacagacac

SEQ ID NO: 1016 - RNA, 19 nt, Artificial Sequence
  Description of Artificial Sequence: Synthetic oligonucleotide
ugaggaccagacagacacg

SEQ ID NO: 1017 - RNA, 19 nt, Artificial Sequence
  Description of Artificial Sequence: Synthetic oligonucleotide
gaggaccagacagacacgg

SEQ ID NO: 1018 - RNA, 19 nt, Artificial Sequence
  Description of Artificial Sequence: Synthetic oligonucleotide
aggaccagacagacacgga

SEQ ID NO: 1019 - RNA, 19 nt, Artificial Sequence
  Description of Artificial Sequence: Synthetic oligonucleotide
ggaccagacagacacggag

SEQ ID NO: 1020 - RNA, 19 nt, Artificial Sequence
  Description of Artificial Sequence: Synthetic oligonucleotide
gaccagacagacacggagg

SEQ ID NO: 1021 - RNA, 19 nt, Artificial Sequence
  Description of Artificial Sequence: Synthetic oligonucleotide
accagacagacacggaggg

SEQ ID NO: 1022 - RNA, 19 nt, Artificial Sequence
  Description of Artificial Sequence: Synthetic oligonucleotide
ccagacagacacggaggga

SEQ ID NO: 1023 - RNA, 19 nt, Artificial Sequence
  Description of Artificial Sequence: Synthetic oligonucleotide
cagacagacacggagggag

SEQ ID NO: 1024 - RNA, 19 nt, Artificial Sequence
  Description of Artificial Sequence: Synthetic oligonucleotide
agacagacacggagggaga

SEQ ID NO: 1025 - RNA, 19 nt, Artificial Sequence
  Description of Artificial Sequence: Synthetic oligonucleotide
gacagacacggagggagag

SEQ ID NO: 1026 - RNA, 19 nt, Artificial Sequence
  Description of Artificial Sequence: Synthetic oligonucleotide
acagacacggagggagagg

SEQ ID NO: 1027 - RNA, 19 nt, Artificial Sequence
  Description of Artificial Sequence: Synthetic oligonucleotide
cagacacggagggagagga

SEQ ID NO: 1028 - RNA, 19 nt, Artificial Sequence
  Description of Artificial Sequence: Synthetic oligonucleotide
agacacggagggagaggac

SEQ ID NO: 1029 - RNA, 19 nt, Artificial Sequence
  Description of Artificial Sequence: Synthetic oligonucleotide
gacacggagggagaggaca

SEQ ID NO: 1030 - RNA, 19 nt, Artificial Sequence
  Description of Artificial Sequence: Synthetic oligonucleotide
acacggagggagaggacac

SEQ ID NO: 1031 - RNA, 19 nt, Artificial Sequence
  Description of Artificial Sequence: Synthetic oligonucleotide
cacggagggagaggacacg

SEQ ID NO: 1032 - RNA, 19 nt, Artificial Sequence
  Description of Artificial Sequence: Synthetic oligonucleotide
acggagggagaggacacgg

SEQ ID NO: 1033 - RNA, 19 nt, Artificial Sequence
  Description of Artificial Sequence: Synthetic oligonucleotide
cggagggagaggacacgga

SEQ ID NO: 1034 - RNA, 19 nt, Artificial Sequence
  Description of Artificial Sequence: Synthetic oligonucleotide
ggagggagaggacacggag

SEQ ID NO: 1035 - RNA, 19 nt, Artificial Sequence
  Description of Artificial Sequence: Synthetic oligonucleotide
gagggagaggacacggagg

SEQ ID NO: 1036 - RNA, 19 nt, Artificial Sequence
  Description of Artificial Sequence: Synthetic oligonucleotide
agggagaggacacggagga

SEQ ID NO: 1037 - RNA, 19 nt, Artificial Sequence
  Description of Artificial Sequence: Synthetic oligonucleotide
gggagaggacacggaggag

SEQ ID NO: 1038 - RNA, 19 nt, Artificial Sequence
  Description of Artificial Sequence: Synthetic oligonucleotide
ggagaggacacggaggagg

SEQ ID NO: 1039 - RNA, 19 nt, Artificial Sequence
  Description of Artificial Sequence: Synthetic oligonucleotide
gagaggacacggaggagga

SEQ ID NO: 1040 - RNA, 19 nt, Artificial Sequence
  Description of Artificial Sequence: Synthetic oligonucleotide
agaggacacggaggaggag

SEQ ID NO: 1041 - RNA, 19 nt, Artificial Sequence
  Description of Artificial Sequence: Synthetic oligonucleotide
gaggacacggaggaggagg

SEQ ID NO: 1042 - RNA, 19 nt, Artificial Sequence
  Description of Artificial Sequence: Synthetic oligonucleotide
aggacacggaggaggagga

SEQ ID NO: 1043 - RNA, 19 nt, Artificial Sequence
  Description of Artificial Sequence: Synthetic oligonucleotide
ggacacggaggaggaggaa

SEQ ID NO: 1044 - RNA, 19 nt, Artificial Sequence
  Description of Artificial Sequence: Synthetic oligonucleotide
gacacggaggaggaggaag

SEQ ID NO: 1045 - RNA, 19 nt, Artificial Sequence
  Description of Artificial Sequence: Synthetic oligonucleotide
acacggaggaggaggaaga

SEQ ID NO: 1046 - RNA, 19 nt, Artificial Sequence
  Description of Artificial Sequence: Synthetic oligonucleotide
cacggaggaggaggaagaa

SEQ ID NO: 1047 - RNA, 19 nt, Artificial Sequence
  Description of Artificial Sequence: Synthetic oligonucleotide
acggaggaggaggaagaau

SEQ ID NO: 1048 - RNA, 19 nt, Artificial Sequence
  Description of Artificial Sequence: Synthetic oligonucleotide
cggaggaggaggaagaauu

SEQ ID NO: 1049 - RNA, 19 nt, Artificial Sequence
  Description of Artificial Sequence: Synthetic oligonucleotide
ggaggaggaggaagaauug

SEQ ID NO: 1050 - RNA, 19 nt, Artificial Sequence
  Description of Artificial Sequence: Synthetic oligonucleotide
gaggaggaggaagaauugg

SEQ ID NO: 1051 - RNA, 19 nt, Artificial Sequence
  Description of Artificial Sequence: Synthetic oligonucleotide
aggaggaggaagaauugga

SEQ ID NO: 1052 - RNA, 19 nt, Artificial Sequence
  Description of Artificial Sequence: Synthetic oligonucleotide
ggaggaggaagaauuggag

SEQ ID NO: 1053 - RNA, 19 nt, Artificial Sequence
  Description of Artificial Sequence: Synthetic oligonucleotide
gaggaggaagaauuggaga

SEQ ID NO: 1054 - RNA, 19 nt, Artificial Sequence
  Description of Artificial Sequence: Synthetic oligonucleotide
aggaggaagaauuggagac

SEQ ID NO: 1055 - RNA, 19 nt, Artificial Sequence
  Description of Artificial Sequence: Synthetic oligonucleotide
ggaggaagaauuggagacu

SEQ ID NO: 1056 - RNA, 19 nt, Artificial Sequence
  Description of Artificial Sequence: Synthetic oligonucleotide
gaggaagaauuggagacug

SEQ ID NO: 1057 - RNA, 19 nt, Artificial Sequence
  Description of Artificial Sequence: Synthetic oligonucleotide
aggaagaauuggagacuga

SEQ ID NO: 1058 - RNA, 19 nt, Artificial Sequence
  Description of Artificial Sequence: Synthetic oligonucleotide
ggaagaauuggagacugag

SEQ ID NO: 1059 - RNA, 19 nt, Artificial Sequence
  Description of Artificial Sequence: Synthetic oligonucleotide
gaagaauuggagacugagg

SEQ ID NO: 1060 - RNA, 19 nt, Artificial Sequence
  Description of Artificial Sequence: Synthetic oligonucleotide
aagaauuggagacugagga

SEQ ID NO: 1061 - RNA, 19 nt, Artificial Sequence
  Description of Artificial Sequence: Synthetic oligonucleotide
agaauuggagacugaggag

SEQ ID NO: 1062 - RNA, 19 nt, Artificial Sequence
  Description of Artificial Sequence: Synthetic oligonucleotide
gaauuggagacugaggaga

SEQ ID NO: 1063 - RNA, 19 nt, Artificial Sequence
  Description of Artificial Sequence: Synthetic oligonucleotide
aauuggagacugaggagaa

SEQ ID NO: 1064 - RNA, 19 nt, Artificial Sequence
  Description of Artificial Sequence: Synthetic oligonucleotide
auuggagacugaggagaac

SEQ ID NO: 1065 - RNA, 19 nt, Artificial Sequence
  Description of Artificial Sequence: Synthetic oligonucleotide
uuggagacugaggagaaca

SEQ ID NO: 1066 - RNA, 19 nt, Artificial Sequence
  Description of Artificial Sequence: Synthetic oligonucleotide
uggagacugaggagaacaa

SEQ ID NO: 1067 - RNA, 19 nt, Artificial Sequence
  Description of Artificial Sequence: Synthetic oligonucleotide
ggagacugaggagaacaag

SEQ ID NO: 1068 - RNA, 19 nt, Artificial Sequence
  Description of Artificial Sequence: Synthetic oligonucleotide
gagacugaggagaacaagu

SEQ ID NO: 1069 - RNA, 19 nt, Artificial Sequence
  Description of Artificial Sequence: Synthetic oligonucleotide
agacugaggagaacaaguu

SEQ ID NO: 1070 - RNA, 19 nt, Artificial Sequence
  Description of Artificial Sequence: Synthetic oligonucleotide
gacugaggagaacaaguuc

SEQ ID NO: 1071 - RNA, 19 nt, Artificial Sequence
  Description of Artificial Sequence: Synthetic oligonucleotide
acugaggagaacaaguuca

SEQ ID NO: 1072 - RNA, 19 nt, Artificial Sequence
  Description of Artificial Sequence: Synthetic oligonucleotide
cugaggagaacaaguucag

SEQ ID NO: 1073 - RNA, 19 nt, Artificial Sequence
  Description of Artificial Sequence: Synthetic oligonucleotide
ugaggagaacaaguucagu

SEQ ID NO: 1074 - RNA, 19 nt, Artificial Sequence
  Description of Artificial Sequence: Synthetic oligonucleotide
gaggagaacaaguucagug

SEQ ID NO: 1075 - RNA, 19 nt, Artificial Sequence
  Description of Artificial Sequence: Synthetic oligonucleotide
aggagaacaaguucaguga

SEQ ID NO: 1076 - RNA, 19 nt, Artificial Sequence
  Description of Artificial Sequence: Synthetic oligonucleotide
ggagaacaaguucagugag

SEQ ID NO: 1077 - RNA, 19 nt, Artificial Sequence
  Description of Artificial Sequence: Synthetic oligonucleotide
gagaacaaguucagugagg

SEQ ID NO: 1078 - RNA, 19 nt, Artificial Sequence
  Description of Artificial Sequence: Synthetic oligonucleotide
agaacaaguucagugaggu

SEQ ID NO: 1079 - RNA, 19 nt, Artificial Sequence
  Description of Artificial Sequence: Synthetic oligonucleotide
gaacaaguucagugaggua

SEQ ID NO: 1080 - RNA, 19 nt, Artificial Sequence
  Description of Artificial Sequence: Synthetic oligonucleotide
aacaaguucagugagguag

SEQ ID NO: 1081 - RNA, 19 nt, Artificial Sequence
  Description of Artificial Sequence: Synthetic oligonucleotide
acaaguucagugagguagc

SEQ ID NO: 1082 - RNA, 19 nt, Artificial Sequence
  Description of Artificial Sequence: Synthetic oligonucleotide
caaguucagugagguagca

SEQ ID NO: 1083 - RNA, 19 nt, Artificial Sequence
  Description of Artificial Sequence: Synthetic oligonucleotide
aaguucagugagguagcag

SEQ ID NO: 1084 - RNA, 19 nt, Artificial Sequence
  Description of Artificial Sequence: Synthetic oligonucleotide
aguucagugagguagcagc

SEQ ID NO: 1085 - RNA, 19 nt, Artificial Sequence
  Description of Artificial Sequence: Synthetic oligonucleotide
guucagugagguagcagcc

SEQ ID NO: 1086 - RNA, 19 nt, Artificial Sequence
  Description of Artificial Sequence: Synthetic oligonucleotide
uucagugagguagcagccc

SEQ ID NO: 1087 - RNA, 19 nt, Artificial Sequence
  Description of Artificial Sequence: Synthetic oligonucleotide
ucagugagguagcagcccu

SEQ ID NO: 1088 - RNA, 19 nt, Artificial Sequence
  Description of Artificial Sequence: Synthetic oligonucleotide
cagugagguagcagcccug

SEQ ID NO: 1089 - RNA, 19 nt, Artificial Sequence
  Description of Artificial Sequence: Synthetic oligonucleotide
agugagguagcagcccugc

SEQ ID NO: 1090 - RNA, 19 nt, Artificial Sequence
  Description of Artificial Sequence: Synthetic oligonucleotide
gugagguagcagcccugcc

SEQ ID NO: 1091 - RNA, 19 nt, Artificial Sequence
  Description of Artificial Sequence: Synthetic oligonucleotide
ugagguagcagcccugcca

SEQ ID NO: 1092 - RNA, 19 nt, Artificial Sequence
  Description of Artificial Sequence: Synthetic oligonucleotide
gagguagcagcccugccag

SEQ ID NO: 1093 - RNA, 19 nt, Artificial Sequence
  Description of Artificial Sequence: Synthetic oligonucleotide
agguagcagcccugccagg

SEQ ID NO: 1094 - RNA, 19 nt, Artificial Sequence
  Description of Artificial Sequence: Synthetic oligonucleotide
gguagcagcccugccaggc

SEQ ID NO: 1095 - RNA, 19 nt, Artificial Sequence
  Description of Artificial Sequence: Synthetic oligonucleotide
guagcagcccugccaggcc

SEQ ID NO: 1096 - RNA, 19 nt, Artificial Sequence
  Description of Artificial Sequence: Synthetic oligonucleotide
uagcagcccugccaggccc

SEQ ID NO: 1097 - RNA, 19 nt, Artificial Sequence
  Description of Artificial Sequence: Synthetic oligonucleotide
agcagcccugccaggcccu

SEQ ID NO: 1098 - RNA, 19 nt, Artificial Sequence
  Description of Artificial Sequence: Synthetic oligonucleotide
gcagcccugccaggcccuc

SEQ ID NO: 1099 - RNA, 19 nt, Artificial Sequence
  Description of Artificial Sequence: Synthetic oligonucleotide
cagcccugccaggcccucg

SEQ ID NO: 1100 - RNA, 19 nt, Artificial Sequence
  Description of Artificial Sequence: Synthetic oligonucleotide
agcccugccaggcccucga

SEQ ID NO: 1101 - RNA, 19 nt, Artificial Sequence
  Description of Artificial Sequence: Synthetic oligonucleotide
gcccugccaggcccucgag

SEQ ID NO: 1102 - RNA, 19 nt, Artificial Sequence
  Description of Artificial Sequence: Synthetic oligonucleotide
cccugccaggcccucgagg

SEQ ID NO: 1103 - RNA, 19 nt, Artificial Sequence
  Description of Artificial Sequence: Synthetic oligonucleotide
ccugccaggcccucgaggc

SEQ ID NO: 1104 - RNA, 19 nt, Artificial Sequence
  Description of Artificial Sequence: Synthetic oligonucleotide
cugccaggcccucgaggcc

SEQ ID NO: 1105 - RNA, 19 nt, Artificial Sequence
  Description of Artificial Sequence: Synthetic oligonucleotide
ugccaggcccucgaggccu

SEQ ID NO: 1106 - RNA, 19 nt, Artificial Sequence
  Description of Artificial Sequence: Synthetic oligonucleotide
gccaggcccucgaggccuc

SEQ ID NO: 1107 - RNA, 19 nt, Artificial Sequence
  Description of Artificial Sequence: Synthetic oligonucleotide
ccaggcccucgaggccucc

SEQ ID NO: 1108 - RNA, 19 nt, Artificial Sequence
  Description of Artificial Sequence: Synthetic oligonucleotide
caggcccucgaggccuccu

SEQ ID NO: 1109 - RNA, 19 nt, Artificial Sequence
  Description of Artificial Sequence: Synthetic oligonucleotide
aggcccucgaggccuccug

SEQ ID NO: 1110 - RNA, 19 nt, Artificial Sequence
  Description of Artificial Sequence: Synthetic oligonucleotide
ggcccucgaggccuccugg

SEQ ID NO: 1111 - RNA, 19 nt, Artificial Sequence
  Description of Artificial Sequence: Synthetic oligonucleotide
gcccucgaggccuccuggg

SEQ ID NO: 1112 - RNA, 19 nt, Artificial Sequence
  Description of Artificial Sequence: Synthetic oligonucleotide
cccucgaggccuccugggu

SEQ ID NO: 1113 - RNA, 19 nt, Artificial Sequence
  Description of Artificial Sequence: Synthetic oligonucleotide
ccucgaggccuccugggug

SEQ ID NO: 1114 - RNA, 19 nt, Artificial Sequence
  Description of Artificial Sequence: Synthetic oligonucleotide
cucgaggccuccugggugg

SEQ ID NO: 1115 - RNA, 19 nt, Artificial Sequence
  Description of Artificial Sequence: Synthetic oligonucleotide
ucgaggccuccuggguggu

SEQ ID NO: 1116 - RNA, 19 nt, Artificial Sequence
  Description of Artificial Sequence: Synthetic oligonucleotide
cgaggccuccuggguggug

SEQ ID NO: 1117 - RNA, 19 nt, Artificial Sequence
  Description of Artificial Sequence: Synthetic oligonucleotide
gaggccuccuggguggugu

SEQ ID NO: 1118 - RNA, 19 nt, Artificial Sequence
  Description of Artificial Sequence: Synthetic oligonucleotide
aggccuccuggguggugug

SEQ ID NO: 1119 - RNA, 19 nt, Artificial Sequence
  Description of Artificial Sequence: Synthetic oligonucleotide
ggccuccuggguggugugg

SEQ ID NO: 1120 - RNA, 19 nt, Artificial Sequence
  Description of Artificial Sequence: Synthetic oligonucleotide
gccuccugggugguguggc

SEQ ID NO: 1121 - RNA, 19 nt, Artificial Sequence
  Description of Artificial Sequence: Synthetic oligonucleotide
ccuccugggugguguggca

SEQ ID NO: 1122 - RNA, 19 nt, Artificial Sequence
  Description of Artificial Sequence: Synthetic oligonucleotide
cuccugggugguguggcac

SEQ ID NO: 1123 - RNA, 19 nt, Artificial Sequence
  Description of Artificial Sequence: Synthetic oligonucleotide
uccugggugguguggcaca

SEQ ID NO: 1124 - RNA, 19 nt, Artificial Sequence
  Description of Artificial Sequence: Synthetic oligonucleotide
ccugggugguguggcacau

SEQ ID NO: 1125 - RNA, 19 nt, Artificial Sequence
  Description of Artificial Sequence: Synthetic oligonucleotide
cugggugguguggcacaua

SEQ ID NO: 1126 - RNA, 19 nt, Artificial Sequence
  Description of Artificial Sequence: Synthetic oligonucleotide
ugggugguguggcacauac

SEQ ID NO: 1127 - RNA, 19 nt, Artificial Sequence
  Description of Artificial Sequence: Synthetic oligonucleotide
gggugguguggcacauacc

SEQ ID NO: 1128 - RNA, 19 nt, Artificial Sequence
  Description of Artificial Sequence: Synthetic oligonucleotide
ggugguguggcacauaccc

SEQ ID NO: 1129 - RNA, 19 nt, Artificial Sequence
  Description of Artificial Sequence: Synthetic oligonucleotide
gugguguggcacauacccu

SEQ ID NO: 1130 - RNA, 19 nt, Artificial Sequence
  Description of Artificial Sequence: Synthetic oligonucleotide
ugguguggcacauacccug

SEQ ID NO: 1131 - RNA, 19 nt, Artificial Sequence
  Description of Artificial Sequence: Synthetic oligonucleotide
gguguggcacauacccugc

SEQ ID NO: 1132 - RNA, 19 nt, Artificial Sequence
  Description of Artificial Sequence: Synthetic oligonucleotide
guguggcacauacccugca

SEQ ID NO: 1133 - RNA, 19 nt, Artificial Sequence
  Description of Artificial Sequence: Synthetic oligonucleotide
uguggcacauacccugcag

SEQ ID NO: 1134 - RNA, 19 nt, Artificial Sequence
  Description of Artificial Sequence: Synthetic oligonucleotide
guggcacauacccugcaga

SEQ ID NO: 1135 - RNA, 19 nt, Artificial Sequence
  Description of Artificial Sequence: Synthetic oligonucleotide
uggcacauacccugcagaa

SEQ ID NO: 1136 - RNA, 19 nt, Artificial Sequence
  Description of Artificial Sequence: Synthetic oligonucleotide
ggcacauacccugcagaag

SEQ ID NO: 1137 - RNA, 19 nt, Artificial Sequence
  Description of Artificial Sequence: Synthetic oligonucleotide
gcacauacccugcagaaga

SEQ ID NO: 1138 - RNA, 19 nt, Artificial Sequence
  Description of Artificial Sequence: Synthetic oligonucleotide
cacauacccugcagaagac

SEQ ID NO: 1139 - RNA, 19 nt, Artificial Sequence
  Description of Artificial Sequence: Synthetic oligonucleotide
acauacccugcagaagacc

SEQ ID NO: 1140 - RNA, 19 nt, Artificial Sequence
  Description of Artificial Sequence: Synthetic oligonucleotide
cauacccugcagaagaccc

SEQ ID NO: 1141 - RNA, 19 nt, Artificial Sequence
  Description of Artificial Sequence: Synthetic oligonucleotide
auacccugcagaagacccu

SEQ ID NO: 1142 - RNA, 19 nt, Artificial Sequence
  Description of Artificial Sequence: Synthetic oligonucleotide
uacccugcagaagacccuc

SEQ ID NO: 1143 - RNA, 19 nt, Artificial Sequence
  Description of Artificial Sequence: Synthetic oligonucleotide
acccugcagaagacccucc

SEQ ID NO: 1144 - RNA, 19 nt, Artificial Sequence
  Description of Artificial Sequence: Synthetic oligonucleotide
cccugcagaagacccucca

SEQ ID NO: 1145 - RNA, 19 nt, Artificial Sequence
  Description of Artificial Sequence: Synthetic oligonucleotide
ccugcagaagacccuccag

SEQ ID NO: 1146 - RNA, 19 nt, Artificial Sequence
  Description of Artificial Sequence: Synthetic oligonucleotide
cugcagaagacccuccaga

SEQ ID NO: 1147 - RNA, 19 nt, Artificial Sequence
  Description of Artificial Sequence: Synthetic oligonucleotide
ugcagaagacccuccagac

SEQ ID NO: 1148 - RNA, 19 nt, Artificial Sequence
  Description of Artificial Sequence: Synthetic oligonucleotide
gcagaagacccuccagacc

SEQ ID NO: 1149 - RNA, 19 nt, Artificial Sequence
  Description of Artificial Sequence: Synthetic oligonucleotide
cagaagacccuccagacca

SEQ ID NO: 1150 - RNA, 19 nt, Artificial Sequence
  Description of Artificial Sequence: Synthetic oligonucleotide
agaagacccuccagaccac

SEQ ID NO: 1151 - RNA, 19 nt, Artificial Sequence
  Description of Artificial Sequence: Synthetic oligonucleotide
gaagacccuccagaccacc

SEQ ID NO: 1152 - RNA, 19 nt, Artificial Sequence
  Description of Artificial Sequence: Synthetic oligonucleotide
aagacccuccagaccacca

SEQ ID NO: 1153 - RNA, 19 nt, Artificial Sequence
  Description of Artificial Sequence: Synthetic oligonucleotide
agacccuccagaccaccau

SEQ ID NO: 1154 - RNA, 19 nt, Artificial Sequence
  Description of Artificial Sequence: Synthetic oligonucleotide
gacccuccagaccaccauc

SEQ ID NO: 1155 - RNA, 19 nt, Artificial Sequence
  Description of Artificial Sequence: Synthetic oligonucleotide
acccuccagaccaccaucu

SEQ ID NO: 1156 - RNA, 19 nt, Artificial Sequence
  Description of Artificial Sequence: Synthetic oligonucleotide
cccuccagaccaccaucuc

SEQ ID NO: 1157 - RNA, 19 nt, Artificial Sequence
  Description of Artificial Sequence: Synthetic oligonucleotide
ccuccagaccaccaucucg

SEQ ID NO: 1158 - RNA, 19 nt, Artificial Sequence
  Description of Artificial Sequence: Synthetic oligonucleotide
cuccagaccaccaucucgg

SEQ ID NO: 1159 - RNA, 19 nt, Artificial Sequence
  Description of Artificial Sequence: Synthetic oligonucleotide
uccagaccaccaucucggc

SEQ ID NO: 1160 - RNA, 19 nt, Artificial Sequence
  Description of Artificial Sequence: Synthetic oligonucleotide
ccagaccaccaucucggcu

SEQ ID NO: 1161 - RNA, 19 nt, Artificial Sequence
  Description of Artificial Sequence: Synthetic oligonucleotide
cagaccaccaucucggcug

SEQ ID NO: 1162 - RNA, 19 nt, Artificial Sequence
  Description of Artificial Sequence: Synthetic oligonucleotide
agaccaccaucucggcugu

SEQ ID NO: 1163 - RNA, 19 nt, Artificial Sequence
  Description of Artificial Sequence: Synthetic oligonucleotide
gaccaccaucucggcugug

SEQ ID NO: 1164 - RNA, 19 nt, Artificial Sequence
  Description of Artificial Sequence: Synthetic oligonucleotide
accaccaucucggcuguga

SEQ ID NO: 1165 - RNA, 19 nt, Artificial Sequence
  Description of Artificial Sequence: Synthetic oligonucleotide
ccaccaucucggcugugac

SEQ ID NO: 1166 - RNA, 19 nt, Artificial Sequence
  Description of Artificial Sequence: Synthetic oligonucleotide
caccaucucggcugugaca

SEQ ID NO: 1167 - RNA, 19 nt, Artificial Sequence
  Description of Artificial Sequence: Synthetic oligonucleotide
accaucucggcugugacau

SEQ ID NO: 1168 - RNA, 19 nt, Artificial Sequence
  Description of Artificial Sequence: Synthetic oligonucleotide
ccaucucggcugugacaug

SEQ ID NO: 1169 - RNA, 19 nt, Artificial Sequence
  Description of Artificial Sequence: Synthetic oligonucleotide
caucucggcugugacaugg

SEQ ID NO: 1170 - RNA, 19 nt, Artificial Sequence
  Description of Artificial Sequence: Synthetic oligonucleotide
aucucggcugugacauggg

SEQ ID NO: 1171 - RNA, 19 nt, Artificial Sequence
  Description of Artificial Sequence: Synthetic oligonucleotide
ucucggcugugacaugggc

SEQ ID NO: 1172 - RNA, 19 nt, Artificial Sequence
  Description of Artificial Sequence: Synthetic oligonucleotide
cucggcugugacaugggca

SEQ ID NO: 1173 - RNA, 19 nt, Artificial Sequence
  Description of Artificial Sequence: Synthetic oligonucleotide
ucggcugugacaugggcac

SEQ ID NO: 1174 - RNA, 19 nt, Artificial Sequence
  Description of Artificial Sequence: Synthetic oligonucleotide
cggcugugacaugggcacc

SEQ ID NO: 1175 - RNA, 19 nt, Artificial Sequence
  Description of Artificial Sequence: Synthetic oligonucleotide
ggcugugacaugggcaccu

SEQ ID NO: 1176 - RNA, 19 nt, Artificial Sequence
  Description of Artificial Sequence: Synthetic oligonucleotide
gcugugacaugggcaccug

SEQ ID NO: 1177 - RNA, 19 nt, Artificial Sequence
  Description of Artificial Sequence: Synthetic oligonucleotide
cugugacaugggcaccugc

SEQ ID NO: 1178 - RNA, 19 nt, Artificial Sequence
  Description of Artificial Sequence: Synthetic oligonucleotide
ugugacaugggcaccugca

SEQ ID NO: 1179 - RNA, 19 nt, Artificial Sequence
  Description of Artificial Sequence: Synthetic oligonucleotide
gugacaugggcaccugcag

SEQ ID NO: 1180 - RNA, 19 nt, Artificial Sequence
  Description of Artificial Sequence: Synthetic oligonucleotide
ugacaugggcaccugcagc

SEQ ID NO: 1181 - RNA, 19 nt, Artificial Sequence
  Description of Artificial Sequence: Synthetic oligonucleotide
gacaugggcaccugcagcu

SEQ ID NO: 1182 - RNA, 19 nt, Artificial Sequence
  Description of Artificial Sequence: Synthetic oligonucleotide
acaugggcaccugcagcug

SEQ ID NO: 1183 - RNA, 19 nt, Artificial Sequence
  Description of Artificial Sequence: Synthetic oligonucleotide
caugggcaccugcagcugu

SEQ ID NO: 1184 - RNA, 19 nt, Artificial Sequence
  Description of Artificial Sequence: Synthetic oligonucleotide
augggcaccugcagcugug

SEQ ID NO: 1185 - RNA, 19 nt, Artificial Sequence
  Description of Artificial Sequence: Synthetic oligonucleotide
ugggcaccugcagcugugc

SEQ ID NO: 1186 - RNA, 19 nt, Artificial Sequence
  Description of Artificial Sequence: Synthetic oligonucleotide
gggcaccugcagcugugcu

SEQ ID NO: 1187 - RNA, 19 nt, Artificial Sequence
  Description of Artificial Sequence: Synthetic oligonucleotide
ggcaccugcagcugugcug

SEQ ID NO: 1188 - RNA, 19 nt, Artificial Sequence
  Description of Artificial Sequence: Synthetic oligonucleotide
gcaccugcagcugugcugg

SEQ ID NO: 1189 - RNA, 19 nt, Artificial Sequence
  Description of Artificial Sequence: Synthetic oligonucleotide
caccugcagcugugcuggg

SEQ ID NO: 1190 - RNA, 19 nt, Artificial Sequence
  Description of Artificial Sequence: Synthetic oligonucleotide
accugcagcugugcugggc

SEQ ID NO: 1191 - RNA, 19 nt, Artificial Sequence
  Description of Artificial Sequence: Synthetic oligonucleotide
ccugcagcugugcugggca

SEQ ID NO: 1192 - RNA, 19 nt, Artificial Sequence
  Description of Artificial Sequence: Synthetic oligonucleotide
cugcagcugugcugggcau

SEQ ID NO: 1193 - RNA, 19 nt, Artificial Sequence
  Description of Artificial Sequence: Synthetic oligonucleotide
ugcagcugugcugggcaug

SEQ ID NO: 1194 - RNA, 19 nt, Artificial Sequence
  Description of Artificial Sequence: Synthetic oligonucleotide
gcagcugugcugggcaugg

SEQ ID NO: 1195 - RNA, 19 nt, Artificial Sequence
  Description of Artificial Sequence: Synthetic oligonucleotide
cagcugugcugggcauggc

SEQ ID NO: 1196 - RNA, 19 nt, Artificial Sequence
  Description of Artificial Sequence: Synthetic oligonucleotide
agcugugcugggcauggca

SEQ ID NO: 1197 - RNA, 19 nt, Artificial Sequence
  Description of Artificial Sequence: Synthetic oligonucleotide
gcugugcugggcauggcag

SEQ ID NO: 1198 - RNA, 19 nt, Artificial Sequence
  Description of Artificial Sequence: Synthetic oligonucleotide
cugugcugggcauggcagg

SEQ ID NO: 1199 - RNA, 19 nt, Artificial Sequence
  Description of Artificial Sequence: Synthetic oligonucleotide
ugugcugggcauggcaggg

SEQ ID NO: 1200 - RNA, 19 nt, Artificial Sequence
  Description of Artificial Sequence: Synthetic oligonucleotide
gugcugggcauggcaggga

SEQ ID NO: 1201 - RNA, 19 nt, Artificial Sequence
  Description of Artificial Sequence: Synthetic oligonucleotide
ugcugggcauggcagggag

SEQ ID NO: 1202 - RNA, 19 nt, Artificial Sequence
  Description of Artificial Sequence: Synthetic oligonucleotide
gcugggcauggcagggagg

SEQ ID NO: 1203 - RNA, 19 nt, Artificial Sequence
  Description of Artificial Sequence: Synthetic oligonucleotide
cugggcauggcagggaggg

SEQ ID NO: 1204 - RNA, 19 nt, Artificial Sequence
  Description of Artificial Sequence: Synthetic oligonucleotide
ugggcauggcagggagggu

SEQ ID NO: 1205 - RNA, 19 nt, Artificial Sequence
  Description of Artificial Sequence: Synthetic oligonucleotide
gggcauggcagggagggug

SEQ ID NO: 1206 - RNA, 19 nt, Artificial Sequence
  Description of Artificial Sequence: Synthetic oligonucleotide
ggcauggcagggagggugc

SEQ ID NO: 1207 - RNA, 19 nt, Artificial Sequence
  Description of Artificial Sequence: Synthetic oligonucleotide
gcauggcagggagggugcu

SEQ ID NO: 1208 - RNA, 19 nt, Artificial Sequence
  Description of Artificial Sequence: Synthetic oligonucleotide
cauggcagggagggugcug

SEQ ID NO: 1209 - RNA, 19 nt, Artificial Sequence
  Description of Artificial Sequence: Synthetic oligonucleotide
auggcagggagggugcugc

SEQ ID NO: 1210 - RNA, 19 nt, Artificial Sequence
  Description of Artificial Sequence: Synthetic oligonucleotide
uggcagggagggugcugca

SEQ ID NO: 1211 - RNA, 19 nt, Artificial Sequence
  Description of Artificial Sequence: Synthetic oligonucleotide
ggcagggagggugcugcac

SEQ ID NO: 1212 - RNA, 19 nt, Artificial Sequence
  Description of Artificial Sequence: Synthetic oligonucleotide
gcagggagggugcugcacc

SEQ ID NO: 1213 - RNA, 19 nt, Artificial Sequence
  Description of Artificial Sequence: Synthetic oligonucleotide
cagggagggugcugcaccu

SEQ ID NO: 1214 - RNA, 19 nt, Artificial Sequence
  Description of Artificial Sequence: Synthetic oligonucleotide
agggagggugcugcaccuc

SEQ ID NO: 1215 - RNA, 19 nt, Artificial Sequence
  Description of Artificial Sequence: Synthetic oligonucleotide
gggagggugcugcaccuca

SEQ ID NO: 1216 - RNA, 19 nt, Artificial Sequence
  Description of Artificial Sequence: Synthetic oligonucleotide
ggagggugcugcaccucac

SEQ ID NO: 1217 - RNA, 19 nt, Artificial Sequence
  Description of Artificial Sequence: Synthetic oligonucleotide
gagggugcugcaccucaca

SEQ ID NO: 1218 - RNA, 19 nt, Artificial Sequence
  Description of Artificial Sequence: Synthetic oligonucleotide
agggugcugcaccucacac

SEQ ID NO: 1219 - RNA, 19 nt, Artificial Sequence
  Description of Artificial Sequence: Synthetic oligonucleotide
gggugcugcaccucacacc

SEQ ID NO: 1220 - RNA, 19 nt, Artificial Sequence
  Description of Artificial Sequence: Synthetic oligonucleotide
ggugcugcaccucacacca

SEQ ID NO: 1221 - RNA, 19 nt, Artificial Sequence
  Description of Artificial Sequence: Synthetic oligonucleotide
gugcugcaccucacaccag

SEQ ID NO: 1222 - RNA, 19 nt, Artificial Sequence
  Description of Artificial Sequence: Synthetic oligonucleotide
ugcugcaccucacaccagc

SEQ ID NO: 1223 - RNA, 19 nt, Artificial Sequence
  Description of Artificial Sequence: Synthetic oligonucleotide
gcugcaccucacaccagcc

SEQ ID NO: 1224 - RNA, 19 nt, Artificial Sequence
  Description of Artificial Sequence: Synthetic oligonucleotide
cugcaccucacaccagccc

SEQ ID NO: 1225 - RNA, 19 nt, Artificial Sequence
  Description of Artificial Sequence: Synthetic oligonucleotide
ugcaccucacaccagcccc

SEQ ID NO: 1226 - RNA, 19 nt, Artificial Sequence
  Description of Artificial Sequence: Synthetic oligonucleotide
gcaccucacaccagccccu

SEQ ID NO: 1227 - RNA, 19 nt, Artificial Sequence
  Description of Artificial Sequence: Synthetic oligonucleotide
caccucacaccagccccug

SEQ ID NO: 1228 - RNA, 19 nt, Artificial Sequence
  Description of Artificial Sequence: Synthetic oligonucleotide
accucacaccagccccugc

SEQ ID NO: 1229 - RNA, 19 nt, Artificial Sequence
  Description of Artificial Sequence: Synthetic oligonucleotide
ccucacaccagccccugcu

SEQ ID NO: 1230 - RNA, 19 nt, Artificial Sequence
  Description of Artificial Sequence: Synthetic oligonucleotide
cucacaccagccccugcug

SEQ ID NO: 1231 - RNA, 19 nt, Artificial Sequence
  Description of Artificial Sequence: Synthetic oligonucleotide
ucacaccagccccugcugu

SEQ ID NO: 1232 - RNA, 19 nt, Artificial Sequence
  Description of Artificial Sequence: Synthetic oligonucleotide
cacaccagccccugcuguc

SEQ ID NO: 1233 - RNA, 19 nt, Artificial Sequence
  Description of Artificial Sequence: Synthetic oligonucleotide
acaccagccccugcugucu

SEQ ID NO: 1234 - RNA, 19 nt, Artificial Sequence
  Description of Artificial Sequence: Synthetic oligonucleotide
caccagccccugcugucuc

SEQ ID NO: 1235 - RNA, 19 nt, Artificial Sequence
  Description of Artificial Sequence: Synthetic oligonucleotide
accagccccugcugucucc

SEQ ID NO: 1236 - RNA, 19 nt, Artificial Sequence
  Description of Artificial Sequence: Synthetic oligonucleotide
ccagccccugcugucuccu

SEQ ID NO: 1237 - RNA, 19 nt, Artificial Sequence
  Description of Artificial Sequence: Synthetic oligonucleotide
cagccccugcugucuccuc

SEQ ID NO: 1238 - RNA, 19 nt, Artificial Sequence
  Description of Artificial Sequence: Synthetic oligonucleotide
agccccugcugucuccuca

SEQ ID NO: 1239 - RNA, 19 nt, Artificial Sequence
  Description of Artificial Sequence: Synthetic oligonucleotide
gccccugcugucuccucaa

SEQ ID NO: 1240 - RNA, 19 nt, Artificial Sequence
  Description of Artificial Sequence: Synthetic oligonucleotide
ccccugcugucuccucaac

SEQ ID NO: 1241 - RNA, 19 nt, Artificial Sequence
  Description of Artificial Sequence: Synthetic oligonucleotide
cccugcugucuccucaacc

SEQ ID NO: 1242 - RNA, 19 nt, Artificial Sequence
  Description of Artificial Sequence: Synthetic oligonucleotide
ccugcugucuccucaacca

SEQ ID NO: 1243 - RNA, 19 nt, Artificial Sequence
  Description of Artificial Sequence: Synthetic oligonucleotide
cugcugucuccucaaccaa

SEQ ID NO: 1244 - RNA, 19 nt, Artificial Sequence
  Description of Artificial Sequence: Synthetic oligonucleotide
ugcugucuccucaaccaag

SEQ ID NO: 1245 - RNA, 19 nt, Artificial Sequence
  Description of Artificial Sequence: Synthetic oligonucleotide
gcugucuccucaaccaagg

SEQ ID NO: 1246 - RNA, 19 nt, Artificial Sequence
  Description of Artificial Sequence: Synthetic oligonucleotide
cugucuccucaaccaaggg

SEQ ID NO: 1247 - RNA, 19 nt, Artificial Sequence
  Description of Artificial Sequence: Synthetic oligonucleotide
ugucuccucaaccaagggg

SEQ ID NO: 1248 - RNA, 19 nt, Artificial Sequence
  Description of Artificial Sequence: Synthetic oligonucleotide
gucuccucaaccaagggga

SEQ ID NO: 1249 - RNA, 19 nt, Artificial Sequence
  Description of Artificial Sequence: Synthetic oligonucleotide
ucuccucaaccaaggggag

SEQ ID NO: 1250 - RNA, 19 nt, Artificial Sequence
  Description of Artificial Sequence: Synthetic oligonucleotide
cuccucaaccaaggggagg

SEQ ID NO: 1251 - RNA, 19 nt, Artificial Sequence
  Description of Artificial Sequence: Synthetic oligonucleotide
uccucaaccaaggggaggg

SEQ ID NO: 1252 - RNA, 19 nt, Artificial Sequence
  Description of Artificial Sequence: Synthetic oligonucleotide
ccucaaccaaggggagggc

SEQ ID NO: 1253 - RNA, 19 nt, Artificial Sequence
  Description of Artificial Sequence: Synthetic oligonucleotide
cucaaccaaggggagggcc

SEQ ID NO: 1254 - RNA, 19 nt, Artificial Sequence
  Description of Artificial Sequence: Synthetic oligonucleotide
ucaaccaaggggagggcca

SEQ ID NO: 1255 - RNA, 19 nt, Artificial Sequence
  Description of Artificial Sequence: Synthetic oligonucleotide
caaccaaggggagggccau

SEQ ID NO: 1256 - RNA, 19 nt, Artificial Sequence
  Description of Artificial Sequence: Synthetic oligonucleotide
aaccaaggggagggccaug

SEQ ID NO: 1257 - RNA, 19 nt, Artificial Sequence
  Description of Artificial Sequence: Synthetic oligonucleotide
accaaggggagggccaugu

SEQ ID NO: 1258 - RNA, 19 nt, Artificial Sequence
  Description of Artificial Sequence: Synthetic oligonucleotide
ccaaggggagggccauguc

SEQ ID NO: 1259 - RNA, 19 nt, Artificial Sequence
  Description of Artificial Sequence: Synthetic oligonucleotide
caaggggagggccaugucc

SEQ ID NO: 1260 - RNA, 19 nt, Artificial Sequence
  Description of Artificial Sequence: Synthetic oligonucleotide
aaggggagggccauguccc

SEQ ID NO: 1261 - RNA, 19 nt, Artificial Sequence
  Description of Artificial Sequence: Synthetic oligonucleotide
aggggagggccaugucccu

SEQ ID NO: 1262 - RNA, 19 nt, Artificial Sequence
  Description of Artificial Sequence: Synthetic oligonucleotide
ggggagggccaugucccua

SEQ ID NO: 1263 - RNA, 19 nt, Artificial Sequence
  Description of Artificial Sequence: Synthetic oligonucleotide
gggagggccaugucccuau

SEQ ID NO: 1264 - RNA, 19 nt, Artificial Sequence
  Description of Artificial Sequence: Synthetic oligonucleotide
ggagggccaugucccuauc

SEQ ID NO: 1265 - RNA, 19 nt, Artificial Sequence
  Description of Artificial Sequence: Synthetic oligonucleotide
gagggccaugucccuauca

SEQ ID NO: 1266 - RNA, 19 nt, Artificial Sequence
  Description of Artificial Sequence: Synthetic oligonucleotide
agggccaugucccuaucag

SEQ ID NO: 1267 - RNA, 19 nt, Artificial Sequence
  Description of Artificial Sequence: Synthetic oligonucleotide
gggccaugucccuaucaga

SEQ ID NO: 1268 - RNA, 19 nt, Artificial Sequence
  Description of Artificial Sequence: Synthetic oligonucleotide
ggccaugucccuaucagau

SEQ ID NO: 1269 - RNA, 19 nt, Artificial Sequence
  Description of Artificial Sequence: Synthetic oligonucleotide
gccaugucccuaucagaug

SEQ ID NO: 1270 - RNA, 19 nt, Artificial Sequence
  Description of Artificial Sequence: Synthetic oligonucleotide
ccaugucccuaucagaugc

SEQ ID NO: 1271 - RNA, 19 nt, Artificial Sequence
  Description of Artificial Sequence: Synthetic oligonucleotide
caugucccuaucagaugcc

SEQ ID NO: 1272 - RNA, 19 nt, Artificial Sequence
  Description of Artificial Sequence: Synthetic oligonucleotide
augucccuaucagaugccc

SEQ ID NO: 1273 - RNA, 19 nt, Artificial Sequence
  Description of Artificial Sequence: Synthetic oligonucleotide
ugucccuaucagaugcccu

SEQ ID NO: 1274 - RNA, 19 nt, Artificial Sequence
  Description of Artificial Sequence: Synthetic oligonucleotide
gucccuaucagaugcccug

SEQ ID NO: 1275 - RNA, 19 nt, Artificial Sequence
  Description of Artificial Sequence: Synthetic oligonucleotide
ucccuaucagaugcccuga

SEQ ID NO: 1276 - RNA, 19 nt, Artificial Sequence
  Description of Artificial Sequence: Synthetic oligonucleotide
cccuaucagaugcccugaa

SEQ ID NO: 1277 - RNA, 19 nt, Artificial Sequence
  Description of Artificial Sequence: Synthetic oligonucleotide
ccuaucagaugcccugaag

SEQ ID NO: 1278 - RNA, 19 nt, Artificial Sequence
  Description of Artificial Sequence: Synthetic oligonucleotide
cuaucagaugcccugaagg

SEQ ID NO: 1279 - RNA, 19 nt, Artificial Sequence
  Description of Artificial Sequence: Synthetic oligonucleotide
uaucagaugcccugaaggg

SEQ ID NO: 1280 - RNA, 19 nt, Artificial Sequence
  Description of Artificial Sequence: Synthetic oligonucleotide
aucagaugcccugaagggc

SEQ ID NO: 1281 - RNA, 19 nt, Artificial Sequence
  Description of Artificial Sequence: Synthetic oligonucleotide
ucagaugcccugaagggcg

SEQ ID NO: 1282 - RNA, 19 nt, Artificial Sequence
  Description of Artificial Sequence: Synthetic oligonucleotide
cagaugcccugaagggcgu

SEQ ID NO: 1283 - RNA, 19 nt, Artificial Sequence
  Description of Artificial Sequence: Synthetic oligonucleotide
agaugcccugaagggcguu

SEQ ID NO: 1284 - RNA, 19 nt, Artificial Sequence
  Description of Artificial Sequence: Synthetic oligonucleotide
gaugcccugaagggcguua

SEQ ID NO: 1285 - RNA, 19 nt, Artificial Sequence
  Description of Artificial Sequence: Synthetic oligonucleotide
augcccugaagggcguuac

SEQ ID NO: 1286 - RNA, 19 nt, Artificial Sequence
  Description of Artificial Sequence: Synthetic oligonucleotide
ugcccugaagggcguuacu

SEQ ID NO: 1287 - RNA, 19 nt, Artificial Sequence
  Description of Artificial Sequence: Synthetic oligonucleotide
gcccugaagggcguuacug

SEQ ID NO: 1288 - RNA, 19 nt, Artificial Sequence
  Description of Artificial Sequence: Synthetic oligonucleotide
cccugaagggcguuacuga

SEQ ID NO: 1289 - RNA, 19 nt, Artificial Sequence
  Description of Artificial Sequence: Synthetic oligonucleotide
ccugaagggcguuacugac

SEQ ID NO: 1290 - RNA, 19 nt, Artificial Sequence
  Description of Artificial Sequence: Synthetic oligonucleotide
cugaagggcguuacugaca

SEQ ID NO: 1291 - RNA, 19 nt, Artificial Sequence
  Description of Artificial Sequence: Synthetic oligonucleotide
ugaagggcguuacugacaa

SEQ ID NO: 1292 - RNA, 19 nt, Artificial Sequence
  Description of Artificial Sequence: Synthetic oligonucleotide
gaagggcguuacugacaac

SEQ ID NO: 1293 - RNA, 19 nt, Artificial Sequence
  Description of Artificial Sequence: Synthetic oligonucleotide
aagggcguuacugacaacg

SEQ ID NO: 1294 - RNA, 19 nt, Artificial Sequence
  Description of Artificial Sequence: Synthetic oligonucleotide
agggcguuacugacaacgu

SEQ ID NO: 1295 - RNA, 19 nt, Artificial Sequence
  Description of Artificial Sequence: Synthetic oligonucleotide
gggcguuacugacaacgug

SEQ ID NO: 1296 - RNA, 19 nt, Artificial Sequence
  Description of Artificial Sequence: Synthetic oligonucleotide
ggcguuacugacaacgugg

SEQ ID NO: 1297 - RNA, 19 nt, Artificial Sequence
  Description of Artificial Sequence: Synthetic oligonucleotide
gcguuacugacaacguggu

SEQ ID NO: 1298 - RNA, 19 nt, Artificial Sequence
  Description of Artificial Sequence: Synthetic oligonucleotide
cguuacugacaacguggug

SEQ ID NO: 1299 - RNA, 19 nt, Artificial Sequence
  Description of Artificial Sequence: Synthetic oligonucleotide
guuacugacaacguggugg

SEQ ID NO: 1300 - RNA, 19 nt, Artificial Sequence
  Description of Artificial Sequence: Synthetic oligonucleotide
uuacugacaacguggugga

SEQ ID NO: 1301 - RNA, 19 nt, Artificial Sequence
  Description of Artificial Sequence: Synthetic oligonucleotide
uacugacaacgugguggac

SEQ ID NO: 1302 - RNA, 19 nt, Artificial Sequence
  Description of Artificial Sequence: Synthetic oligonucleotide
acugacaacgugguggaca

SEQ ID NO: 1303 - RNA, 19 nt, Artificial Sequence
  Description of Artificial Sequence: Synthetic oligonucleotide
cugacaacgugguggacac

SEQ ID NO: 1304 - RNA, 19 nt, Artificial Sequence
  Description of Artificial Sequence: Synthetic oligonucleotide
ugacaacgugguggacaca

SEQ ID NO: 1305 - RNA, 19 nt, Artificial Sequence
  Description of Artificial Sequence: Synthetic oligonucleotide
gacaacgugguggacacag

SEQ ID NO: 1306 - RNA, 19 nt, Artificial Sequence
  Description of Artificial Sequence: Synthetic oligonucleotide
acaacgugguggacacagu

SEQ ID NO: 1307 - RNA, 19 nt, Artificial Sequence
  Description of Artificial Sequence: Synthetic oligonucleotide
caacgugguggacacagug

SEQ ID NO: 1308 - RNA, 19 nt, Artificial Sequence
  Description of Artificial Sequence: Synthetic oligonucleotide
aacgugguggacacagugg

SEQ ID NO: 1309 - RNA, 19 nt, Artificial Sequence
  Description of Artificial Sequence: Synthetic oligonucleotide
acgugguggacacaguggu

SEQ ID NO: 1310 - RNA, 19 nt, Artificial Sequence
  Description of Artificial Sequence: Synthetic oligonucleotide
cgugguggacacaguggug

SEQ ID NO: 1311 - RNA, 19 nt, Artificial Sequence
  Description of Artificial Sequence: Synthetic oligonucleotide
gugguggacacaguggugc

SEQ ID NO: 1312 - RNA, 19 nt, Artificial Sequence
  Description of Artificial Sequence: Synthetic oligonucleotide
ugguggacacaguggugca

SEQ ID NO: 1313 - RNA, 19 nt, Artificial Sequence
  Description of Artificial Sequence: Synthetic oligonucleotide
gguggacacaguggugcau

SEQ ID NO: 1314 - RNA, 19 nt, Artificial Sequence
  Description of Artificial Sequence: Synthetic oligonucleotide
guggacacaguggugcauu

SEQ ID NO: 1315 - RNA, 19 nt, Artificial Sequence
  Description of Artificial Sequence: Synthetic oligonucleotide
uggacacaguggugcauua

SEQ ID NO: 1316 - RNA, 19 nt, Artificial Sequence
  Description of Artificial Sequence: Synthetic oligonucleotide
ggacacaguggugcauuac

SEQ ID NO: 1317 - RNA, 19 nt, Artificial Sequence
  Description of Artificial Sequence: Synthetic oligonucleotide
gacacaguggugcauuacg

SEQ ID NO: 1318 - RNA, 19 nt, Artificial Sequence
  Description of Artificial Sequence: Synthetic oligonucleotide
acacaguggugcauuacgu

SEQ ID NO: 1319 - RNA, 19 nt, Artificial Sequence
  Description of Artificial Sequence: Synthetic oligonucleotide
cacaguggugcauuacgug

SEQ ID NO: 1320 - RNA, 19 nt, Artificial Sequence
  Description of Artificial Sequence: Synthetic oligonucleotide
acaguggugcauuacgugc

SEQ ID NO: 1321 - RNA, 19 nt, Artificial Sequence
  Description of Artificial Sequence: Synthetic oligonucleotide
caguggugcauuacgugcc

SEQ ID NO: 1322 - RNA, 19 nt, Artificial Sequence
  Description of Artificial Sequence: Synthetic oligonucleotide
aguggugcauuacgugccg

SEQ ID NO: 1323 - RNA, 19 nt, Artificial Sequence
  Description of Artificial Sequence: Synthetic oligonucleotide
guggugcauuacgugccgc

SEQ ID NO: 1324 - RNA, 19 nt, Artificial Sequence
  Description of Artificial Sequence: Synthetic oligonucleotide
uggugcauuacgugccgcu

SEQ ID NO: 1325 - RNA, 19 nt, Artificial Sequence
  Description of Artificial Sequence: Synthetic oligonucleotide
ggugcauuacgugccgcuc

SEQ ID NO: 1326 - RNA, 19 nt, Artificial Sequence
  Description of Artificial Sequence: Synthetic oligonucleotide
gugcauuacgugccgcucc

SEQ ID NO: 1327 - RNA, 19 nt, Artificial Sequence
  Description of Artificial Sequence: Synthetic oligonucleotide
ugcauuacgugccgcuccc

SEQ ID NO: 1328 - RNA, 19 nt, Artificial Sequence
  Description of Artificial Sequence: Synthetic oligonucleotide
gcauuacgugccgcucccc

SEQ ID NO: 1329 - RNA, 19 nt, Artificial Sequence
  Description of Artificial Sequence: Synthetic oligonucleotide
cauuacgugccgcucccca

SEQ ID NO: 1330 - RNA, 19 nt, Artificial Sequence
  Description of Artificial Sequence: Synthetic oligonucleotide
auuacgugccgcuccccag

SEQ ID NO: 1331 - RNA, 19 nt, Artificial Sequence
  Description of Artificial Sequence: Synthetic oligonucleotide
uuacgugccgcuccccagg

SEQ ID NO: 1332 - RNA, 19 nt, Artificial Sequence
  Description of Artificial Sequence: Synthetic oligonucleotide
uacgugccgcuccccaggc

SEQ ID NO: 1333 - RNA, 19 nt, Artificial Sequence
  Description of Artificial Sequence: Synthetic oligonucleotide
acgugccgcuccccaggcu

SEQ ID NO: 1334 - RNA, 19 nt, Artificial Sequence
  Description of Artificial Sequence: Synthetic oligonucleotide
cgugccgcuccccaggcug

SEQ ID NO: 1335 - RNA, 19 nt, Artificial Sequence
  Description of Artificial Sequence: Synthetic oligonucleotide
gugccgcuccccaggcugu

SEQ ID NO: 1336 - RNA, 19 nt, Artificial Sequence
  Description of Artificial Sequence: Synthetic oligonucleotide
ugccgcuccccaggcuguc

SEQ ID NO: 1337 - RNA, 19 nt, Artificial Sequence
  Description of Artificial Sequence: Synthetic oligonucleotide
gccgcuccccaggcugucg

SEQ ID NO: 1338 - RNA, 19 nt, Artificial Sequence
  Description of Artificial Sequence: Synthetic oligonucleotide
ccgcuccccaggcugucgc

SEQ ID NO: 1339 - RNA, 19 nt, Artificial Sequence
  Description of Artificial Sequence: Synthetic oligonucleotide
cgcuccccaggcugucgcu

SEQ ID NO: 1340 - RNA, 19 nt, Artificial Sequence
  Description of Artificial Sequence: Synthetic oligonucleotide
gcuccccaggcugucgcug

SEQ ID NO: 1341 - RNA, 19 nt, Artificial Sequence
  Description of Artificial Sequence: Synthetic oligonucleotide
cuccccaggcugucgcuga

SEQ ID NO: 1342 - RNA, 19 nt, Artificial Sequence
  Description of Artificial Sequence: Synthetic oligonucleotide
uccccaggcugucgcugau

SEQ ID NO: 1343 - RNA, 19 nt, Artificial Sequence
  Description of Artificial Sequence: Synthetic oligonucleotide
ccccaggcugucgcugaug

SEQ ID NO: 1344 - RNA, 19 nt, Artificial Sequence
  Description of Artificial Sequence: Synthetic oligonucleotide
cccaggcugucgcugaugg

SEQ ID NO: 1345 - RNA, 19 nt, Artificial Sequence
  Description of Artificial Sequence: Synthetic oligonucleotide
ccaggcugucgcugaugga

SEQ ID NO: 1346 - RNA, 19 nt, Artificial Sequence
  Description of Artificial Sequence: Synthetic oligonucleotide
caggcugucgcugauggag

SEQ ID NO: 1347 - RNA, 19 nt, Artificial Sequence
  Description of Artificial Sequence: Synthetic oligonucleotide
aggcugucgcugauggagc

SEQ ID NO: 1348 - RNA, 19 nt, Artificial Sequence
  Description of Artificial Sequence: Synthetic oligonucleotide
ggcugucgcugauggagcc

SEQ ID NO: 1349 - RNA, 19 nt, Artificial Sequence
  Description of Artificial Sequence: Synthetic oligonucleotide
gcugucgcugauggagccc

SEQ ID NO: 1350 - RNA, 19 nt, Artificial Sequence
  Description of Artificial Sequence: Synthetic oligonucleotide
cugucgcugauggagcccg

SEQ ID NO: 1351 - RNA, 19 nt, Artificial Sequence
  Description of Artificial Sequence: Synthetic oligonucleotide
ugucgcugauggagcccga

SEQ ID NO: 1352 - RNA, 19 nt, Artificial Sequence
  Description of Artificial Sequence: Synthetic oligonucleotide
gucgcugauggagcccgag

SEQ ID NO: 1353 - RNA, 19 nt, Artificial Sequence
  Description of Artificial Sequence: Synthetic oligonucleotide
ucgcugauggagcccgaga

SEQ ID NO: 1354 - RNA, 19 nt, Artificial Sequence
  Description of Artificial Sequence: Synthetic oligonucleotide
cgcugauggagcccgagag

SEQ ID NO: 1355 - RNA, 19 nt, Artificial Sequence
  Description of Artificial Sequence: Synthetic oligonucleotide
gcugauggagcccgagagc

SEQ ID NO: 1356 - RNA, 19 nt, Artificial Sequence
  Description of Artificial Sequence: Synthetic oligonucleotide
cugauggagcccgagagcg

SEQ ID NO: 1357 - RNA, 19 nt, Artificial Sequence
  Description of Artificial Sequence: Synthetic oligonucleotide
ugauggagcccgagagcga

SEQ ID NO: 1358 - RNA, 19 nt, Artificial Sequence
  Description of Artificial Sequence: Synthetic oligonucleotide
gauggagcccgagagcgaa

SEQ ID NO: 1359 - RNA, 19 nt, Artificial Sequence
  Description of Artificial Sequence: Synthetic oligonucleotide
auggagcccgagagcgaau

SEQ ID NO: 1360 - RNA, 19 nt, Artificial Sequence
  Description of Artificial Sequence: Synthetic oligonucleotide
uggagcccgagagcgaauu

SEQ ID NO: 1361 - RNA, 19 nt, Artificial Sequence
  Description of Artificial Sequence: Synthetic oligonucleotide
ggagcccgagagcgaauuc

SEQ ID NO: 1362 - RNA, 19 nt, Artificial Sequence
  Description of Artificial Sequence: Synthetic oligonucleotide
gagcccgagagcgaauucc

SEQ ID NO: 1363 - RNA, 19 nt, Artificial Sequence
  Description of Artificial Sequence: Synthetic oligonucleotide
agcccgagagcgaauuccg

SEQ ID NO: 1364 - RNA, 19 nt, Artificial Sequence
  Description of Artificial Sequence: Synthetic oligonucleotide
gcccgagagcgaauuccgg

SEQ ID NO: 1365 - RNA, 19 nt, Artificial Sequence
  Description of Artificial Sequence: Synthetic oligonucleotide
cccgagagcgaauuccggg

SEQ ID NO: 1366 - RNA, 19 nt, Artificial Sequence
  Description of Artificial Sequence: Synthetic oligonucleotide
ccgagagcgaauuccggga

SEQ ID NO: 1367 - RNA, 19 nt, Artificial Sequence
  Description of Artificial Sequence: Synthetic oligonucleotide
cgagagcgaauuccgggac

SEQ ID NO: 1368 - RNA, 19 nt, Artificial Sequence
  Description of Artificial Sequence: Synthetic oligonucleotide
gagagcgaauuccgggaca

SEQ ID NO: 1369 - RNA, 19 nt, Artificial Sequence
  Description of Artificial Sequence: Synthetic oligonucleotide
agagcgaauuccgggacau

SEQ ID NO: 1370 - RNA, 19 nt, Artificial Sequence
  Description of Artificial Sequence: Synthetic oligonucleotide
gagcgaauuccgggacauc

SEQ ID NO: 1371 - RNA, 19 nt, Artificial Sequence
  Description of Artificial Sequence: Synthetic oligonucleotide
agcgaauuccgggacaucg

SEQ ID NO: 1372 - RNA, 19 nt, Artificial Sequence
  Description of Artificial Sequence: Synthetic oligonucleotide
gcgaauuccgggacaucga

SEQ ID NO: 1373 - RNA, 19 nt, Artificial Sequence
  Description of Artificial Sequence: Synthetic oligonucleotide
cgaauuccgggacaucgac

SEQ ID NO: 1374 - RNA, 19 nt, Artificial Sequence
  Description of Artificial Sequence: Synthetic oligonucleotide
gaauuccgggacaucgaca

SEQ ID NO: 1375 - RNA, 19 nt, Artificial Sequence
  Description of Artificial Sequence: Synthetic oligonucleotide
aauuccgggacaucgacaa

SEQ ID NO: 1376 - RNA, 19 nt, Artificial Sequence
  Description of Artificial Sequence: Synthetic oligonucleotide
auuccgggacaucgacaac

SEQ ID NO: 1377 - RNA, 19 nt, Artificial Sequence
  Description of Artificial Sequence: Synthetic oligonucleotide
uuccgggacaucgacaacc

SEQ ID NO: 1378 - RNA, 19 nt, Artificial Sequence
  Description of Artificial Sequence: Synthetic oligonucleotide
uccgggacaucgacaaccc

SEQ ID NO: 1379 - RNA, 19 nt, Artificial Sequence
  Description of Artificial Sequence: Synthetic oligonucleotide
ccgggacaucgacaaccca

SEQ ID NO: 1380 - RNA, 19 nt, Artificial Sequence
  Description of Artificial Sequence: Synthetic oligonucleotide
cgggacaucgacaacccac

SEQ ID NO: 1381 - RNA, 19 nt, Artificial Sequence
  Description of Artificial Sequence: Synthetic oligonucleotide
gggacaucgacaacccacc

SEQ ID NO: 1382 - RNA, 19 nt, Artificial Sequence
  Description of Artificial Sequence: Synthetic oligonucleotide
ggacaucgacaacccacca

SEQ ID NO: 1383 - RNA, 19 nt, Artificial Sequence
  Description of Artificial Sequence: Synthetic oligonucleotide
gacaucgacaacccaccag

SEQ ID NO: 1384 - RNA, 19 nt, Artificial Sequence
  Description of Artificial Sequence: Synthetic oligonucleotide
acaucgacaacccaccagc

SEQ ID NO: 1385 - RNA, 19 nt, Artificial Sequence
  Description of Artificial Sequence: Synthetic oligonucleotide
caucgacaacccaccagcc

SEQ ID NO: 1386 - RNA, 19 nt, Artificial Sequence
  Description of Artificial Sequence: Synthetic oligonucleotide
aucgacaacccaccagccg

SEQ ID NO: 1387 - RNA, 19 nt, Artificial Sequence
  Description of Artificial Sequence: Synthetic oligonucleotide
ucgacaacccaccagccga

SEQ ID NO: 1388 - RNA, 19 nt, Artificial Sequence
  Description of Artificial Sequence: Synthetic oligonucleotide
cgacaacccaccagccgag

SEQ ID NO: 1389 - RNA, 19 nt, Artificial Sequence
  Description of Artificial Sequence: Synthetic oligonucleotide
gacaacccaccagccgagg

SEQ ID NO: 1390 - RNA, 19 nt, Artificial Sequence
  Description of Artificial Sequence: Synthetic oligonucleotide
acaacccaccagccgaggu

SEQ ID NO: 1391 - RNA, 19 nt, Artificial Sequence
  Description of Artificial Sequence: Synthetic oligonucleotide
caacccaccagccgagguc

SEQ ID NO: 1392 - RNA, 19 nt, Artificial Sequence
  Description of Artificial Sequence: Synthetic oligonucleotide
aacccaccagccgaggucg

SEQ ID NO: 1393 - RNA, 19 nt, Artificial Sequence
  Description of Artificial Sequence: Synthetic oligonucleotide
acccaccagccgaggucga

SEQ ID NO: 1394 - RNA, 19 nt, Artificial Sequence
  Description of Artificial Sequence: Synthetic oligonucleotide
cccaccagccgaggucgag

SEQ ID NO: 1395 - RNA, 19 nt, Artificial Sequence
  Description of Artificial Sequence: Synthetic oligonucleotide
ccaccagccgaggucgagc

SEQ ID NO: 1396 - RNA, 19 nt, Artificial Sequence
  Description of Artificial Sequence: Synthetic oligonucleotide
caccagccgaggucgagcg

SEQ ID NO: 1397 - RNA, 19 nt, Artificial Sequence
  Description of Artificial Sequence: Synthetic oligonucleotide
accagccgaggucgagcgc

SEQ ID NO: 1398 - RNA, 19 nt, Artificial Sequence
  Description of Artificial Sequence: Synthetic oligonucleotide
ccagccgaggucgagcgcc

SEQ ID NO: 1399 - RNA, 19 nt, Artificial Sequence
  Description of Artificial Sequence: Synthetic oligonucleotide
cagccgaggucgagcgccg

SEQ ID NO: 1400 - RNA, 19 nt, Artificial Sequence
  Description of Artificial Sequence: Synthetic oligonucleotide
agccgaggucgagcgccgg

SEQ ID NO: 1401 - RNA, 19 nt, Artificial Sequence
  Description of Artificial Sequence: Synthetic oligonucleotide
gccgaggucgagcgccggg

SEQ ID NO: 1402 - RNA, 19 nt, Artificial Sequence
  Description of Artificial Sequence: Synthetic oligonucleotide
ccgaggucgagcgccggga

SEQ ID NO: 1403 - RNA, 19 nt, Artificial Sequence
  Description of Artificial Sequence: Synthetic oligonucleotide
cgaggucgagcgccgggag

SEQ ID NO: 1404 - RNA, 19 nt, Artificial Sequence
  Description of Artificial Sequence: Synthetic oligonucleotide
gaggucgagcgccgggagg

SEQ ID NO: 1405 - RNA, 19 nt, Artificial Sequence
  Description of Artificial Sequence: Synthetic oligonucleotide
aggucgagcgccgggaggc

SEQ ID NO: 1406 - RNA, 19 nt, Artificial Sequence
  Description of Artificial Sequence: Synthetic oligonucleotide
ggucgagcgccgggaggcg

SEQ ID NO: 1407 - RNA, 19 nt, Artificial Sequence
  Description of Artificial Sequence: Synthetic oligonucleotide
gucgagcgccgggaggcgg

SEQ ID NO: 1408 - RNA, 19 nt, Artificial Sequence
  Description of Artificial Sequence: Synthetic oligonucleotide
ucgagcgccgggaggcgga

SEQ ID NO: 1409 - RNA, 19 nt, Artificial Sequence
  Description of Artificial Sequence: Synthetic oligonucleotide
cgagcgccgggaggcggag

SEQ ID NO: 1410 - RNA, 19 nt, Artificial Sequence
  Description of Artificial Sequence: Synthetic oligonucleotide
gagcgccgggaggcggagc

SEQ ID NO: 1411 - RNA, 19 nt, Artificial Sequence
  Description of Artificial Sequence: Synthetic oligonucleotide
agcgccgggaggcggagcg

SEQ ID NO: 1412 - RNA, 19 nt, Artificial Sequence
  Description of Artificial Sequence: Synthetic oligonucleotide
gcgccgggaggcggagcgc

SEQ ID NO: 1413 - RNA, 19 nt, Artificial Sequence
  Description of Artificial Sequence: Synthetic oligonucleotide
cgccgggaggcggagcgca

SEQ ID NO: 1414 - RNA, 19 nt, Artificial Sequence
  Description of Artificial Sequence: Synthetic oligonucleotide
gccgggaggcggagcgcag

SEQ ID NO: 1415 - RNA, 19 nt, Artificial Sequence
  Description of Artificial Sequence: Synthetic oligonucleotide
ccgggaggcggagcgcaga

SEQ ID NO: 1416 - RNA, 19 nt, Artificial Sequence
  Description of Artificial Sequence: Synthetic oligonucleotide
cgggaggcggagcgcagag

SEQ ID NO: 1417 - RNA, 19 nt, Artificial Sequence
  Description of Artificial Sequence: Synthetic oligonucleotide
gggaggcggagcgcagagc

SEQ ID NO: 1418 - RNA, 19 nt, Artificial Sequence
  Description of Artificial Sequence: Synthetic oligonucleotide
ggaggcggagcgcagagcg

SEQ ID NO: 1419 - RNA, 19 nt, Artificial Sequence
  Description of Artificial Sequence: Synthetic oligonucleotide
gaggcggagcgcagagcgu

SEQ ID NO: 1420 - RNA, 19 nt, Artificial Sequence
  Description of Artificial Sequence: Synthetic oligonucleotide
aggcggagcgcagagcguc

SEQ ID NO: 1421 - RNA, 19 nt, Artificial Sequence
  Description of Artificial Sequence: Synthetic oligonucleotide
ggcggagcgcagagcgucu

SEQ ID NO: 1422 - RNA, 19 nt, Artificial Sequence
  Description of Artificial Sequence: Synthetic oligonucleotide
gcggagcgcagagcgucug

SEQ ID NO: 1423 - RNA, 19 nt, Artificial Sequence
  Description of Artificial Sequence: Synthetic oligonucleotide
cggagcgcagagcgucugg

SEQ ID NO: 1424 - RNA, 19 nt, Artificial Sequence
  Description of Artificial Sequence: Synthetic oligonucleotide
ggagcgcagagcgucuggg

SEQ ID NO: 1425 - RNA, 19 nt, Artificial Sequence
  Description of Artificial Sequence: Synthetic oligonucleotide
gagcgcagagcgucugggg

SEQ ID NO: 1426 - RNA, 19 nt, Artificial Sequence
  Description of Artificial Sequence: Synthetic oligonucleotide
agcgcagagcgucuggggc

SEQ ID NO: 1427 - RNA, 19 nt, Artificial Sequence
  Description of Artificial Sequence: Synthetic oligonucleotide
gcgcagagcgucuggggcg

SEQ ID NO: 1428 - RNA, 19 nt, Artificial Sequence
  Description of Artificial Sequence: Synthetic oligonucleotide
cgcagagcgucuggggcgc

SEQ ID NO: 1429 - RNA, 19 nt, Artificial Sequence
  Description of Artificial Sequence: Synthetic oligonucleotide
gcagagcgucuggggcgcc

SEQ ID NO: 1430 - RNA, 19 nt, Artificial Sequence
  Description of Artificial Sequence: Synthetic oligonucleotide
cagagcgucuggggcgccg

SEQ ID NO: 1431 - RNA, 19 nt, Artificial Sequence
  Description of Artificial Sequence: Synthetic oligonucleotide
agagcgucuggggcgccgu

SEQ ID NO: 1432 - RNA, 19 nt, Artificial Sequence
  Description of Artificial Sequence: Synthetic oligonucleotide
gagcgucuggggcgccguc

SEQ ID NO: 1433 - RNA, 19 nt, Artificial Sequence
  Description of Artificial Sequence: Synthetic oligonucleotide
agcgucuggggcgccgucc

SEQ ID NO: 1434 - RNA, 19 nt, Artificial Sequence
  Description of Artificial Sequence: Synthetic oligonucleotide
gcgucuggggcgccguccg

SEQ ID NO: 1435 - RNA, 19 nt, Artificial Sequence
  Description of Artificial Sequence: Synthetic oligonucleotide
cgucuggggcgccguccgc

SEQ ID NO: 1436 - RNA, 19 nt, Artificial Sequence
  Description of Artificial Sequence: Synthetic oligonucleotide
gucuggggcgccguccgcc

SEQ ID NO: 1437 - RNA, 19 nt, Artificial Sequence
  Description of Artificial Sequence: Synthetic oligonucleotide
ucuggggcgccguccgccg

SEQ ID NO: 1438 - RNA, 19 nt, Artificial Sequence
  Description of Artificial Sequence: Synthetic oligonucleotide
cuggggcgccguccgccgg

SEQ ID NO: 1439 - RNA, 19 nt, Artificial Sequence
  Description of Artificial Sequence: Synthetic oligonucleotide
uggggcgccguccgccggc

SEQ ID NO: 1440 - RNA, 19 nt, Artificial Sequence
  Description of Artificial Sequence: Synthetic oligonucleotide
ggggcgccguccgccggcc

SEQ ID NO: 1441 - RNA, 19 nt, Artificial Sequence
  Description of Artificial Sequence: Synthetic oligonucleotide
gggcgccguccgccggccc

SEQ ID NO: 1442 - RNA, 19 nt, Artificial Sequence
  Description of Artificial Sequence: Synthetic oligonucleotide
ggcgccguccgccggcccg

SEQ ID NO: 1443 - RNA, 19 nt, Artificial Sequence
  Description of Artificial Sequence: Synthetic oligonucleotide
gcgccguccgccggcccgg

SEQ ID NO: 1444 - RNA, 19 nt, Artificial Sequence
  Description of Artificial Sequence: Synthetic oligonucleotide
cgccguccgccggcccgga

SEQ ID NO: 1445 - RNA, 19 nt, Artificial Sequence
  Description of Artificial Sequence: Synthetic oligonucleotide
gccguccgccggcccggag

SEQ ID NO: 1446 - RNA, 19 nt, Artificial Sequence
  Description of Artificial Sequence: Synthetic oligonucleotide
ccguccgccggcccggagc

SEQ ID NO: 1447 - RNA, 19 nt, Artificial Sequence
  Description of Artificial Sequence: Synthetic oligonucleotide
cguccgccggcccggagcc

SEQ ID NO: 1448 - RNA, 19 nt, Artificial Sequence
  Description of Artificial Sequence: Synthetic oligonucleotide
guccgccggcccggagccc

SEQ ID NO: 1449 - RNA, 19 nt, Artificial Sequence
  Description of Artificial Sequence: Synthetic oligonucleotide
uccgccggcccggagcccg

SEQ ID NO: 1450 - RNA, 19 nt, Artificial Sequence
  Description of Artificial Sequence: Synthetic oligonucleotide
ccgccggcccggagcccgc

SEQ ID NO: 1451 - RNA, 19 nt, Artificial Sequence
  Description of Artificial Sequence: Synthetic oligonucleotide
cgccggcccggagcccgcc

SEQ ID NO: 1452 - RNA, 19 nt, Artificial Sequence
  Description of Artificial Sequence: Synthetic oligonucleotide
gccggcccggagcccgccc

SEQ ID NO: 1453 - RNA, 19 nt, Artificial Sequence
  Description of Artificial Sequence: Synthetic oligonucleotide
ccggcccggagcccgcccc

SEQ ID NO: 1454 - RNA, 19 nt, Artificial Sequence
  Description of Artificial Sequence: Synthetic oligonucleotide
cggcccggagcccgccccg

SEQ ID NO: 1455 - RNA, 19 nt, Artificial Sequence
  Description of Artificial Sequence: Synthetic oligonucleotide
ggcccggagcccgccccgc

SEQ ID NO: 1456 - RNA, 19 nt, Artificial Sequence
  Description of Artificial Sequence: Synthetic oligonucleotide
gcccggagcccgccccgcg

SEQ ID NO: 1457 - RNA, 19 nt, Artificial Sequence
  Description of Artificial Sequence: Synthetic oligonucleotide
cccggagcccgccccgcgu

SEQ ID NO: 1458 - RNA, 19 nt, Artificial Sequence
  Description of Artificial Sequence: Synthetic oligonucleotide
ccggagcccgccccgcguc

SEQ ID NO: 1459 - RNA, 19 nt, Artificial Sequence
  Description of Artificial Sequence: Synthetic oligonucleotide
cggagcccgccccgcgucu

SEQ ID NO: 1460 - RNA, 19 nt, Artificial Sequence
  Description of Artificial Sequence: Synthetic oligonucleotide
ggagcccgccccgcgucuc

SEQ ID NO: 1461 - RNA, 19 nt, Artificial Sequence
  Description of Artificial Sequence: Synthetic oligonucleotide
gagcccgccccgcgucucg

SEQ ID NO: 1462 - RNA, 19 nt, Artificial Sequence
  Description of Artificial Sequence: Synthetic oligonucleotide
agcccgccccgcgucucgc

SEQ ID NO: 1463 - RNA, 19 nt, Artificial Sequence
  Description of Artificial Sequence: Synthetic oligonucleotide
gcccgccccgcgucucgca

SEQ ID NO: 1464 - RNA, 19 nt, Artificial Sequence
  Description of Artificial Sequence: Synthetic oligonucleotide
cccgccccgcgucucgcac

SEQ ID NO: 1465 - RNA, 19 nt, Artificial Sequence
  Description of Artificial Sequence: Synthetic oligonucleotide
ccgccccgcgucucgcaca

SEQ ID NO: 1466 - RNA, 19 nt, Artificial Sequence
  Description of Artificial Sequence: Synthetic oligonucleotide
cgccccgcgucucgcacag

SEQ ID NO: 1467 - RNA, 19 nt, Artificial Sequence
  Description of Artificial Sequence: Synthetic oligonucleotide
gccccgcgucucgcacagc

SEQ ID NO: 1468 - RNA, 19 nt, Artificial Sequence
  Description of Artificial Sequence: Synthetic oligonucleotide
ccccgcgucucgcacagcc

SEQ ID NO: 1469 - RNA, 19 nt, Artificial Sequence
  Description of Artificial Sequence: Synthetic oligonucleotide
cccgcgucucgcacagccc

SEQ ID NO: 1470 - RNA, 19 nt, Artificial Sequence
  Description of Artificial Sequence: Synthetic oligonucleotide
ccgcgucucgcacagcccc

SEQ ID NO: 1471 - RNA, 19 nt, Artificial Sequence
  Description of Artificial Sequence: Synthetic oligonucleotide
cgcgucucgcacagccccg

SEQ ID NO: 1472 - RNA, 19 nt, Artificial Sequence
  Description of Artificial Sequence: Synthetic oligonucleotide
gcgucucgcacagccccgc

SEQ ID NO: 1473 - RNA, 19 nt, Artificial Sequence
  Description of Artificial Sequence: Synthetic oligonucleotide
cgucucgcacagccccgcc

SEQ ID NO: 1474 - RNA, 19 nt, Artificial Sequence
  Description of Artificial Sequence: Synthetic oligonucleotide
gucucgcacagccccgccg

SEQ ID NO: 1475 - RNA, 19 nt, Artificial Sequence
  Description of Artificial Sequence: Synthetic oligonucleotide
ucucgcacagccccgccgc

SEQ ID NO: 1476 - RNA, 19 nt, Artificial Sequence
  Description of Artificial Sequence: Synthetic oligonucleotide
cucgcacagccccgccgca

SEQ ID NO: 1477 - RNA, 19 nt, Artificial Sequence
  Description of Artificial Sequence: Synthetic oligonucleotide
ucgcacagccccgccgcag

SEQ ID NO: 1478 - RNA, 19 nt, Artificial Sequence
  Description of Artificial Sequence: Synthetic oligonucleotide
cgcacagccccgccgcagc

SEQ ID NO: 1479 - RNA, 19 nt, Artificial Sequence
  Description of Artificial Sequence: Synthetic oligonucleotide
gcacagccccgccgcagcc

SEQ ID NO: 1480 - RNA, 19 nt, Artificial Sequence
  Description of Artificial Sequence: Synthetic oligonucleotide
cacagccccgccgcagccu

SEQ ID NO: 1481 - RNA, 19 nt, Artificial Sequence
  Description of Artificial Sequence: Synthetic oligonucleotide
acagccccgccgcagccug

SEQ ID NO: 1482 - RNA, 19 nt, Artificial Sequence
  Description of Artificial Sequence: Synthetic oligonucleotide
cagccccgccgcagccugc

SEQ ID NO: 1483 - RNA, 19 nt, Artificial Sequence
  Description of Artificial Sequence: Synthetic oligonucleotide
agccccgccgcagccugcg

SEQ ID NO: 1484 - RNA, 19 nt, Artificial Sequence
  Description of Artificial Sequence: Synthetic oligonucleotide
gccccgccgcagccugcgc

SEQ ID NO: 1485 - RNA, 19 nt, Artificial Sequence
  Description of Artificial Sequence: Synthetic oligonucleotide
ccccgccgcagccugcgca

SEQ ID NO: 1486 - RNA, 19 nt, Artificial Sequence
  Description of Artificial Sequence: Synthetic oligonucleotide
cccgccgcagccugcgcag

SEQ ID NO: 1487 - RNA, 19 nt, Artificial Sequence
  Description of Artificial Sequence: Synthetic oligonucleotide
ccgccgcagccugcgcagc

SEQ ID NO: 1488 - RNA, 19 nt, Artificial Sequence
  Description of Artificial Sequence: Synthetic oligonucleotide
cgccgcagccugcgcagcg

SEQ ID NO: 1489 - RNA, 19 nt, Artificial Sequence
  Description of Artificial Sequence: Synthetic oligonucleotide
gccgcagccugcgcagcgc

SEQ ID NO: 1490 - RNA, 19 nt, Artificial Sequence
  Description of Artificial Sequence: Synthetic oligonucleotide
ccgcagccugcgcagcgcg

SEQ ID NO: 1491 - RNA, 19 nt, Artificial Sequence
  Description of Artificial Sequence: Synthetic oligonucleotide
cgcagccugcgcagcgcgc

SEQ ID NO: 1492 - RNA, 19 nt, Artificial Sequence
  Description of Artificial Sequence: Synthetic oligonucleotide
gcagccugcgcagcgcgca

SEQ ID NO: 1493 - RNA, 19 nt, Artificial Sequence
  Description of Artificial Sequence: Synthetic oligonucleotide
cagccugcgcagcgcgcag

SEQ ID NO: 1494 - RNA, 19 nt, Artificial Sequence
  Description of Artificial Sequence: Synthetic oligonucleotide
agccugcgcagcgcgcaga

SEQ ID NO: 1495 - RNA, 19 nt, Artificial Sequence
  Description of Artificial Sequence: Synthetic oligonucleotide
gccugcgcagcgcgcagag

SEQ ID NO: 1496 - RNA, 19 nt, Artificial Sequence
  Description of Artificial Sequence: Synthetic oligonucleotide
ccugcgcagcgcgcagagc

SEQ ID NO: 1497 - RNA, 19 nt, Artificial Sequence
  Description of Artificial Sequence: Synthetic oligonucleotide
cugcgcagcgcgcagagcc

SEQ ID NO: 1498 - RNA, 19 nt, Artificial Sequence
  Description of Artificial Sequence: Synthetic oligonucleotide
ugcgcagcgcgcagagccc

SEQ ID NO: 1499 - RNA, 19 nt, Artificial Sequence
  Description of Artificial Sequence: Synthetic oligonucleotide
gcgcagcgcgcagagcccc

SEQ ID NO: 1500 - RNA, 19 nt, Artificial Sequence
  Description of Artificial Sequence: Synthetic oligonucleotide
cgcagcgcgcagagccccg

SEQ ID NO: 1501 - RNA, 19 nt, Artificial Sequence
  Description of Artificial Sequence: Synthetic oligonucleotide
gcagcgcgcagagccccgg

SEQ ID NO: 1502 - RNA, 19 nt, Artificial Sequence
  Description of Artificial Sequence: Synthetic oligonucleotide
cagcgcgcagagccccggc

SEQ ID NO: 1503 - RNA, 19 nt, Artificial Sequence
  Description of Artificial Sequence: Synthetic oligonucleotide
agcgcgcagagccccggcg

SEQ ID NO: 1504 - RNA, 19 nt, Artificial Sequence
  Description of Artificial Sequence: Synthetic oligonucleotide
gcgcgcagagccccggcgc

SEQ ID NO: 1505 - RNA, 19 nt, Artificial Sequence
  Description of Artificial Sequence: Synthetic oligonucleotide
cgcgcagagccccggcgcg

SEQ ID NO: 1506 - RNA, 19 nt, Artificial Sequence
  Description of Artificial Sequence: Synthetic oligonucleotide
gcgcagagccccggcgcgc

SEQ ID NO: 1507 - RNA, 19 nt, Artificial Sequence
  Description of Artificial Sequence: Synthetic oligonucleotide
cgcagagccccggcgcgcc

SEQ ID NO: 1508 - RNA, 19 nt, Artificial Sequence
  Description of Artificial Sequence: Synthetic oligonucleotide
gcagagccccggcgcgccc

SEQ ID NO: 1509 - RNA, 19 nt, Artificial Sequence
  Description of Artificial Sequence: Synthetic oligonucleotide
cagagccccggcgcgcccc

SEQ ID NO: 1510 - RNA, 19 nt, Artificial Sequence
  Description of Artificial Sequence: Synthetic oligonucleotide
agagccccggcgcgccccc

SEQ ID NO: 1511 - RNA, 19 nt, Artificial Sequence
  Description of Artificial Sequence: Synthetic oligonucleotide
gagccccggcgcgcccccc

SEQ ID NO: 1512 - RNA, 19 nt, Artificial Sequence
  Description of Artificial Sequence: Synthetic oligonucleotide
agccccggcgcgccccccg

SEQ ID NO: 1513 - RNA, 19 nt, Artificial Sequence
  Description of Artificial Sequence: Synthetic oligonucleotide
gccccggcgcgccccccgg

SEQ ID NO: 1514 - RNA, 19 nt, Artificial Sequence
  Description of Artificial Sequence: Synthetic oligonucleotide
ccccggcgcgccccccggc

SEQ ID NO: 1515 - RNA, 19 nt, Artificial Sequence
  Description of Artificial Sequence: Synthetic oligonucleotide
cccggcgcgccccccggcc

SEQ ID NO: 1516 - RNA, 19 nt, Artificial Sequence
  Description of Artificial Sequence: Synthetic oligonucleotide
ccggcgcgccccccggccc

SEQ ID NO: 1517 - RNA, 19 nt, Artificial Sequence
  Description of Artificial Sequence: Synthetic oligonucleotide
cggcgcgccccccggcccg

SEQ ID NO: 1518 - RNA, 19 nt, Artificial Sequence
  Description of Artificial Sequence: Synthetic oligonucleotide
ggcgcgccccccggcccgg

SEQ ID NO: 1519 - RNA, 19 nt, Artificial Sequence
  Description of Artificial Sequence: Synthetic oligonucleotide
gcgcgccccccggcccggg

SEQ ID NO: 1520 - RNA, 19 nt, Artificial Sequence
  Description of Artificial Sequence: Synthetic oligonucleotide
cgcgccccccggcccgggc

SEQ ID NO: 1521 - RNA, 19 nt, Artificial Sequence
  Description of Artificial Sequence: Synthetic oligonucleotide
gcgccccccggcccgggcc

SEQ ID NO: 1522 - RNA, 19 nt, Artificial Sequence
  Description of Artificial Sequence: Synthetic oligonucleotide
cgccccccggcccgggccu

SEQ ID NO: 1523 - RNA, 19 nt, Artificial Sequence
  Description of Artificial Sequence: Synthetic oligonucleotide
gccccccggcccgggccug

SEQ ID NO: 1524 - RNA, 19 nt, Artificial Sequence
  Description of Artificial Sequence: Synthetic oligonucleotide
ccccccggcccgggccugg

SEQ ID NO: 1525 - RNA, 19 nt, Artificial Sequence
  Description of Artificial Sequence: Synthetic oligonucleotide
cccccggcccgggccugga

SEQ ID NO: 1526 - RNA, 19 nt, Artificial Sequence
  Description of Artificial Sequence: Synthetic oligonucleotide
ccccggcccgggccuggag

SEQ ID NO: 1527 - RNA, 19 nt, Artificial Sequence
  Description of Artificial Sequence: Synthetic oligonucleotide
cccggcccgggccuggagg

SEQ ID NO: 1528 - RNA, 19 nt, Artificial Sequence
  Description of Artificial Sequence: Synthetic oligonucleotide
ccggcccgggccuggagga

SEQ ID NO: 1529 - RNA, 19 nt, Artificial Sequence
  Description of Artificial Sequence: Synthetic oligonucleotide
cggcccgggccuggaggac

SEQ ID NO: 1530 - RNA, 19 nt, Artificial Sequence
  Description of Artificial Sequence: Synthetic oligonucleotide
ggcccgggccuggaggacg

SEQ ID NO: 1531 - RNA, 19 nt, Artificial Sequence
  Description of Artificial Sequence: Synthetic oligonucleotide
gcccgggccuggaggacga

SEQ ID NO: 1532 - RNA, 19 nt, Artificial Sequence
  Description of Artificial Sequence: Synthetic oligonucleotide
cccgggccuggaggacgaa

SEQ ID NO: 1533 - RNA, 19 nt, Artificial Sequence
  Description of Artificial Sequence: Synthetic oligonucleotide
ccgggccuggaggacgaag

SEQ ID NO: 1534 - RNA, 19 nt, Artificial Sequence
  Description of Artificial Sequence: Synthetic oligonucleotide
cgggccuggaggacgaagu

SEQ ID NO: 1535 - RNA, 19 nt, Artificial Sequence
  Description of Artificial Sequence: Synthetic oligonucleotide
gggccuggaggacgaaguc

SEQ ID NO: 1536 - RNA, 19 nt, Artificial Sequence
  Description of Artificial Sequence: Synthetic oligonucleotide
ggccuggaggacgaagucg

SEQ ID NO: 1537 - RNA, 19 nt, Artificial Sequence
  Description of Artificial Sequence: Synthetic oligonucleotide
gccuggaggacgaagucgc

SEQ ID NO: 1538 - RNA, 19 nt, Artificial Sequence
  Description of Artificial Sequence: Synthetic oligonucleotide
ccuggaggacgaagucgcc

SEQ ID NO: 1539 - RNA, 19 nt, Artificial Sequence
  Description of Artificial Sequence: Synthetic oligonucleotide
cuggaggacgaagucgcca

SEQ ID NO: 1540 - RNA, 19 nt, Artificial Sequence
  Description of Artificial Sequence: Synthetic oligonucleotide
uggaggacgaagucgccac

SEQ ID NO: 1541 - RNA, 19 nt, Artificial Sequence
  Description of Artificial Sequence: Synthetic oligonucleotide
ggaggacgaagucgccacg

SEQ ID NO: 1542 - RNA, 19 nt, Artificial Sequence
  Description of Artificial Sequence: Synthetic oligonucleotide
gaggacgaagucgccacgc

SEQ ID NO: 1543 - RNA, 19 nt, Artificial Sequence
  Description of Artificial Sequence: Synthetic oligonucleotide
aggacgaagucgccacgcc

SEQ ID NO: 1544 - RNA, 19 nt, Artificial Sequence
  Description of Artificial Sequence: Synthetic oligonucleotide
ggacgaagucgccacgccc

SEQ ID NO: 1545 - RNA, 19 nt, Artificial Sequence
  Description of Artificial Sequence: Synthetic oligonucleotide
gacgaagucgccacgcccg

SEQ ID NO: 1546 - RNA, 19 nt, Artificial Sequence
  Description of Artificial Sequence: Synthetic oligonucleotide
acgaagucgccacgcccgc

SEQ ID NO: 1547 - RNA, 19 nt, Artificial Sequence
  Description of Artificial Sequence: Synthetic oligonucleotide
cgaagucgccacgcccgca

SEQ ID NO: 1548 - RNA, 19 nt, Artificial Sequence
  Description of Artificial Sequence: Synthetic oligonucleotide
gaagucgccacgcccgcag

SEQ ID NO: 1549 - RNA, 19 nt, Artificial Sequence
  Description of Artificial Sequence: Synthetic oligonucleotide
aagucgccacgcccgcagc

SEQ ID NO: 1550 - RNA, 19 nt, Artificial Sequence
  Description of Artificial Sequence: Synthetic oligonucleotide
agucgccacgcccgcagcg

SEQ ID NO: 1551 - RNA, 19 nt, Artificial Sequence
  Description of Artificial Sequence: Synthetic oligonucleotide
gucgccacgcccgcagcgc

SEQ ID NO: 1552 - RNA, 19 nt, Artificial Sequence
  Description of Artificial Sequence: Synthetic oligonucleotide
ucgccacgcccgcagcgcc

SEQ ID NO: 1553 - RNA, 19 nt, Artificial Sequence
  Description of Artificial Sequence: Synthetic oligonucleotide
cgccacgcccgcagcgccg

SEQ ID NO: 1554 - RNA, 19 nt, Artificial Sequence
  Description of Artificial Sequence: Synthetic oligonucleotide
gccacgcccgcagcgccgc

SEQ ID NO: 1555 - RNA, 19 nt, Artificial Sequence
  Description of Artificial Sequence: Synthetic oligonucleotide
ccacgcccgcagcgccgcg

SEQ ID NO: 1556 - RNA, 19 nt, Artificial Sequence
  Description of Artificial Sequence: Synthetic oligonucleotide
cacgcccgcagcgccgcgc

SEQ ID NO: 1557 - RNA, 19 nt, Artificial Sequence
  Description of Artificial Sequence: Synthetic oligonucleotide
acgcccgcagcgccgcgcc

SEQ ID NO: 1558 - RNA, 19 nt, Artificial Sequence
  Description of Artificial Sequence: Synthetic oligonucleotide
cgcccgcagcgccgcgccc

SEQ ID NO: 1559 - RNA, 19 nt, Artificial Sequence
  Description of Artificial Sequence: Synthetic oligonucleotide
gcccgcagcgccgcgcccg

SEQ ID NO: 1560 - RNA, 19 nt, Artificial Sequence
  Description of Artificial Sequence: Synthetic oligonucleotide
cccgcagcgccgcgcccgg

SEQ ID NO: 1561 - RNA, 19 nt, Artificial Sequence
  Description of Artificial Sequence: Synthetic oligonucleotide
ccgcagcgccgcgcccggg

SEQ ID NO: 1562 - RNA, 19 nt, Artificial Sequence
  Description of Artificial Sequence: Synthetic oligonucleotide
cgcagcgccgcgcccgggc

SEQ ID NO: 1563 - RNA, 19 nt, Artificial Sequence
  Description of Artificial Sequence: Synthetic oligonucleotide
gcagcgccgcgcccgggcu

SEQ ID NO: 1564 - RNA, 19 nt, Artificial Sequence
  Description of Artificial Sequence: Synthetic oligonucleotide
cagcgccgcgcccgggcuu

SEQ ID NO: 1565 - RNA, 19 nt, Artificial Sequence
  Description of Artificial Sequence: Synthetic oligonucleotide
agcgccgcgcccgggcuuc

SEQ ID NO: 1566 - RNA, 19 nt, Artificial Sequence
  Description of Artificial Sequence: Synthetic oligonucleotide
gcgccgcgcccgggcuucc

SEQ ID NO: 1567 - RNA, 19 nt, Artificial Sequence
  Description of Artificial Sequence: Synthetic oligonucleotide
cgccgcgcccgggcuuccc

SEQ ID NO: 1568 - RNA, 19 nt, Artificial Sequence
  Description of Artificial Sequence: Synthetic oligonucleotide
gccgcgcccgggcuucccg

SEQ ID NO: 1569 - RNA, 19 nt, Artificial Sequence
  Description of Artificial Sequence: Synthetic oligonucleotide
ccgcgcccgggcuucccgg

SEQ ID NO: 1570 - RNA, 19 nt, Artificial Sequence
  Description of Artificial Sequence: Synthetic oligonucleotide
cgcgcccgggcuucccggc

SEQ ID NO: 1571 - RNA, 19 nt, Artificial Sequence
  Description of Artificial Sequence: Synthetic oligonucleotide
gcgcccgggcuucccggcc

SEQ ID NO: 1572 - RNA, 19 nt, Artificial Sequence
  Description of Artificial Sequence: Synthetic oligonucleotide
cgcccgggcuucccggccg

SEQ ID NO: 1573 - RNA, 19 nt, Artificial Sequence
  Description of Artificial Sequence: Synthetic oligonucleotide
gcccgggcuucccggccgu

SEQ ID NO: 1574 - RNA, 19 nt, Artificial Sequence
  Description of Artificial Sequence: Synthetic oligonucleotide
cccgggcuucccggccgug

SEQ ID NO: 1575 - RNA, 19 nt, Artificial Sequence
  Description of Artificial Sequence: Synthetic oligonucleotide
ccgggcuucccggccgugc

SEQ ID NO: 1576 - RNA, 19 nt, Artificial Sequence
  Description of Artificial Sequence: Synthetic oligonucleotide
cgggcuucccggccgugcc

SEQ ID NO: 1577 - RNA, 19 nt, Artificial Sequence
  Description of Artificial Sequence: Synthetic oligonucleotide
gggcuucccggccgugccc

SEQ ID NO: 1578 - RNA, 19 nt, Artificial Sequence
  Description of Artificial Sequence: Synthetic oligonucleotide
ggcuucccggccgugcccc

SEQ ID NO: 1579 - RNA, 19 nt, Artificial Sequence
  Description of Artificial Sequence: Synthetic oligonucleotide
gcuucccggccgugccccg

SEQ ID NO: 1580 - RNA, 19 nt, Artificial Sequence
  Description of Artificial Sequence: Synthetic oligonucleotide
cuucccggccgugccccgc

SEQ ID NO: 1581 - RNA, 19 nt, Artificial Sequence
  Description of Artificial Sequence: Synthetic oligonucleotide
uucccggccgugccccgcg

SEQ ID NO: 1582 - RNA, 19 nt, Artificial Sequence
  Description of Artificial Sequence: Synthetic oligonucleotide
ucccggccgugccccgcga

SEQ ID NO: 1583 - RNA, 19 nt, Artificial Sequence
  Description of Artificial Sequence: Synthetic oligonucleotide
cccggccgugccccgcgag

SEQ ID NO: 1584 - RNA, 19 nt, Artificial Sequence
  Description of Artificial Sequence: Synthetic oligonucleotide
ccggccgugccccgcgaga

SEQ ID NO: 1585 - RNA, 19 nt, Artificial Sequence
  Description of Artificial Sequence: Synthetic oligonucleotide
cggccgugccccgcgagaa

SEQ ID NO: 1586 - RNA, 19 nt, Artificial Sequence
  Description of Artificial Sequence: Synthetic oligonucleotide
ggccgugccccgcgagaag

SEQ ID NO: 1587 - RNA, 19 nt, Artificial Sequence
  Description of Artificial Sequence: Synthetic oligonucleotide
gccgugccccgcgagaagc

SEQ ID NO: 1588 - RNA, 19 nt, Artificial Sequence
  Description of Artificial Sequence: Synthetic oligonucleotide
ccgugccccgcgagaagcc

SEQ ID NO: 1589 - RNA, 19 nt, Artificial Sequence
  Description of Artificial Sequence: Synthetic oligonucleotide
cgugccccgcgagaagcca

SEQ ID NO: 1590 - RNA, 19 nt, Artificial Sequence
  Description of Artificial Sequence: Synthetic oligonucleotide
gugccccgcgagaagccaa

SEQ ID NO: 1591 - RNA, 19 nt, Artificial Sequence
  Description of Artificial Sequence: Synthetic oligonucleotide
ugccccgcgagaagccaaa

SEQ ID NO: 1592 - RNA, 19 nt, Artificial Sequence
  Description of Artificial Sequence: Synthetic oligonucleotide
gccccgcgagaagccaaag

SEQ ID NO: 1593 - RNA, 19 nt, Artificial Sequence
  Description of Artificial Sequence: Synthetic oligonucleotide
ccccgcgagaagccaaagc

SEQ ID NO: 1594 - RNA, 19 nt, Artificial Sequence
  Description of Artificial Sequence: Synthetic oligonucleotide
cccgcgagaagccaaagcg

SEQ ID NO: 1595 - RNA, 19 nt, Artificial Sequence
  Description of Artificial Sequence: Synthetic oligonucleotide
ccgcgagaagccaaagcgc

SEQ ID NO: 1596 - RNA, 19 nt, Artificial Sequence
  Description of Artificial Sequence: Synthetic oligonucleotide
cgcgagaagccaaagcgca

SEQ ID NO: 1597 - RNA, 19 nt, Artificial Sequence
  Description of Artificial Sequence: Synthetic oligonucleotide
gcgagaagccaaagcgcag

SEQ ID NO: 1598 - RNA, 19 nt, Artificial Sequence
  Description of Artificial Sequence: Synthetic oligonucleotide
cgagaagccaaagcgcagg

SEQ ID NO: 1599 - RNA, 19 nt, Artificial Sequence
  Description of Artificial Sequence: Synthetic oligonucleotide
gagaagccaaagcgcaggg

SEQ ID NO: 1600 - RNA, 19 nt, Artificial Sequence
  Description of Artificial Sequence: Synthetic oligonucleotide
agaagccaaagcgcagggu

SEQ ID NO: 1601 - RNA, 19 nt, Artificial Sequence
  Description of Artificial Sequence: Synthetic oligonucleotide
gaagccaaagcgcaggguc

SEQ ID NO: 1602 - RNA, 19 nt, Artificial Sequence
  Description of Artificial Sequence: Synthetic oligonucleotide
aagccaaagcgcaggguca

SEQ ID NO: 1603 - RNA, 19 nt, Artificial Sequence
  Description of Artificial Sequence: Synthetic oligonucleotide
agccaaagcgcagggucag

SEQ ID NO: 1604 - RNA, 19 nt, Artificial Sequence
  Description of Artificial Sequence: Synthetic oligonucleotide
gccaaagcgcagggucagc

SEQ ID NO: 1605 - RNA, 19 nt, Artificial Sequence
  Description of Artificial Sequence: Synthetic oligonucleotide
ccaaagcgcagggucagcg

SEQ ID NO: 1606 - RNA, 19 nt, Artificial Sequence
  Description of Artificial Sequence: Synthetic oligonucleotide
caaagcgcagggucagcga

SEQ ID NO: 1607 - RNA, 19 nt, Artificial Sequence
  Description of Artificial Sequence: Synthetic oligonucleotide
aaagcgcagggucagcgac

SEQ ID NO: 1608 - RNA, 19 nt, Artificial Sequence
  Description of Artificial Sequence: Synthetic oligonucleotide
aagcgcagggucagcgaca

SEQ ID NO: 1609 - RNA, 19 nt, Artificial Sequence
  Description of Artificial Sequence: Synthetic oligonucleotide
agcgcagggucagcgacag

SEQ ID NO: 1610 - RNA, 19 nt, Artificial Sequence
  Description of Artificial Sequence: Synthetic oligonucleotide
gcgcagggucagcgacagc

SEQ ID NO: 1611 - RNA, 19 nt, Artificial Sequence
  Description of Artificial Sequence: Synthetic oligonucleotide
cgcagggucagcgacagcu

SEQ ID NO: 1612 - RNA, 19 nt, Artificial Sequence
  Description of Artificial Sequence: Synthetic oligonucleotide
gcagggucagcgacagcuu

SEQ ID NO: 1613 - RNA, 19 nt, Artificial Sequence
  Description of Artificial Sequence: Synthetic oligonucleotide
cagggucagcgacagcuuc

SEQ ID NO: 1614 - RNA, 19 nt, Artificial Sequence
  Description of Artificial Sequence: Synthetic oligonucleotide
agggucagcgacagcuucu

SEQ ID NO: 1615 - RNA, 19 nt, Artificial Sequence
  Description of Artificial Sequence: Synthetic oligonucleotide
gggucagcgacagcuucuu

SEQ ID NO: 1616 - RNA, 19 nt, Artificial Sequence
  Description of Artificial Sequence: Synthetic oligonucleotide
ggucagcgacagcuucuuc

SEQ ID NO: 1617 - RNA, 19 nt, Artificial Sequence
  Description of Artificial Sequence: Synthetic oligonucleotide
gucagcgacagcuucuucc

SEQ ID NO: 1618 - RNA, 19 nt, Artificial Sequence
  Description of Artificial Sequence: Synthetic oligonucleotide
ucagcgacagcuucuuccg

SEQ ID NO: 1619 - RNA, 19 nt, Artificial Sequence
  Description of Artificial Sequence: Synthetic oligonucleotide
cagcgacagcuucuuccgg

SEQ ID NO: 1620 - RNA, 19 nt, Artificial Sequence
  Description of Artificial Sequence: Synthetic oligonucleotide
agcgacagcuucuuccggc

SEQ ID NO: 1621 - RNA, 19 nt, Artificial Sequence
  Description of Artificial Sequence: Synthetic oligonucleotide
gcgacagcuucuuccggcc

SEQ ID NO: 1622 - RNA, 19 nt, Artificial Sequence
  Description of Artificial Sequence: Synthetic oligonucleotide
cgacagcuucuuccggccc

SEQ ID NO: 1623 - RNA, 19 nt, Artificial Sequence
  Description of Artificial Sequence: Synthetic oligonucleotide
gacagcuucuuccggccca

SEQ ID NO: 1624 - RNA, 19 nt, Artificial Sequence
  Description of Artificial Sequence: Synthetic oligonucleotide
acagcuucuuccggcccag

SEQ ID NO: 1625 - RNA, 19 nt, Artificial Sequence
  Description of Artificial Sequence: Synthetic oligonucleotide
cagcuucuuccggcccagc

SEQ ID NO: 1626 - RNA, 19 nt, Artificial Sequence
  Description of Artificial Sequence: Synthetic oligonucleotide
agcuucuuccggcccagcg

SEQ ID NO: 1627 - RNA, 19 nt, Artificial Sequence
  Description of Artificial Sequence: Synthetic oligonucleotide
gcuucuuccggcccagcgu

SEQ ID NO: 1628 - RNA, 19 nt, Artificial Sequence
  Description of Artificial Sequence: Synthetic oligonucleotide
cuucuuccggcccagcguc

SEQ ID NO: 1629 - RNA, 19 nt, Artificial Sequence
  Description of Artificial Sequence: Synthetic oligonucleotide
uucuuccggcccagcguca

SEQ ID NO: 1630 - RNA, 19 nt, Artificial Sequence
  Description of Artificial Sequence: Synthetic oligonucleotide
ucuuccggcccagcgucau

SEQ ID NO: 1631 - RNA, 19 nt, Artificial Sequence
  Description of Artificial Sequence: Synthetic oligonucleotide
cuuccggcccagcgucaug

SEQ ID NO: 1632 - RNA, 19 nt, Artificial Sequence
  Description of Artificial Sequence: Synthetic oligonucleotide
uuccggcccagcgucaugg

SEQ ID NO: 1633 - RNA, 19 nt, Artificial Sequence
  Description of Artificial Sequence: Synthetic oligonucleotide
uccggcccagcgucaugga

SEQ ID NO: 1634 - RNA, 19 nt, Artificial Sequence
  Description of Artificial Sequence: Synthetic oligonucleotide
ccggcccagcgucauggag

SEQ ID NO: 1635 - RNA, 19 nt, Artificial Sequence
  Description of Artificial Sequence: Synthetic oligonucleotide
cggcccagcgucauggagc

SEQ ID NO: 1636 - RNA, 19 nt, Artificial Sequence
  Description of Artificial Sequence: Synthetic oligonucleotide
ggcccagcgucauggagcc

SEQ ID NO: 1637 - RNA, 19 nt, Artificial Sequence
  Description of Artificial Sequence: Synthetic oligonucleotide
gcccagcgucauggagccc

SEQ ID NO: 1638 - RNA, 19 nt, Artificial Sequence
  Description of Artificial Sequence: Synthetic oligonucleotide
cccagcgucauggagccca

SEQ ID NO: 1639 - RNA, 19 nt, Artificial Sequence
  Description of Artificial Sequence: Synthetic oligonucleotide
ccagcgucauggagcccau

SEQ ID NO: 1640 - RNA, 19 nt, Artificial Sequence
  Description of Artificial Sequence: Synthetic oligonucleotide
cagcgucauggagcccauc

SEQ ID NO: 1641 - RNA, 19 nt, Artificial Sequence
  Description of Artificial Sequence: Synthetic oligonucleotide
agcgucauggagcccaucc

SEQ ID NO: 1642 - RNA, 19 nt, Artificial Sequence
  Description of Artificial Sequence: Synthetic oligonucleotide
gcgucauggagcccauccu

SEQ ID NO: 1643 - RNA, 19 nt, Artificial Sequence
  Description of Artificial Sequence: Synthetic oligonucleotide
cgucauggagcccauccug

SEQ ID NO: 1644 - RNA, 19 nt, Artificial Sequence
  Description of Artificial Sequence: Synthetic oligonucleotide
gucauggagcccauccugg

SEQ ID NO: 1645 - RNA, 19 nt, Artificial Sequence
  Description of Artificial Sequence: Synthetic oligonucleotide
ucauggagcccauccuggg

SEQ ID NO: 1646 - RNA, 19 nt, Artificial Sequence
  Description of Artificial Sequence: Synthetic oligonucleotide
cauggagcccauccugggc

SEQ ID NO: 1647 - RNA, 19 nt, Artificial Sequence
  Description of Artificial Sequence: Synthetic oligonucleotide
auggagcccauccugggcc

SEQ ID NO: 1648 - RNA, 19 nt, Artificial Sequence
  Description of Artificial Sequence: Synthetic oligonucleotide
uggagcccauccugggccg

SEQ ID NO: 1649 - RNA, 19 nt, Artificial Sequence
  Description of Artificial Sequence: Synthetic oligonucleotide
ggagcccauccugggccgc

SEQ ID NO: 1650 - RNA, 19 nt, Artificial Sequence
  Description of Artificial Sequence: Synthetic oligonucleotide
gagcccauccugggccgca

SEQ ID NO: 1651 - RNA, 19 nt, Artificial Sequence
  Description of Artificial Sequence: Synthetic oligonucleotide
agcccauccugggccgcac

SEQ ID NO: 1652 - RNA, 19 nt, Artificial Sequence
  Description of Artificial Sequence: Synthetic oligonucleotide
gcccauccugggccgcacg

SEQ ID NO: 1653 - RNA, 19 nt, Artificial Sequence
  Description of Artificial Sequence: Synthetic oligonucleotide
cccauccugggccgcacgc

SEQ ID NO: 1654 - RNA, 19 nt, Artificial Sequence
  Description of Artificial Sequence: Synthetic oligonucleotide
ccauccugggccgcacgca

SEQ ID NO: 1655 - RNA, 19 nt, Artificial Sequence
  Description of Artificial Sequence: Synthetic oligonucleotide
cauccugggccgcacgcau

SEQ ID NO: 1656 - RNA, 19 nt, Artificial Sequence
  Description of Artificial Sequence: Synthetic oligonucleotide
auccugggccgcacgcauu

SEQ ID NO: 1657 - RNA, 19 nt, Artificial Sequence
  Description of Artificial Sequence: Synthetic oligonucleotide
uccugggccgcacgcauua

SEQ ID NO: 1658 - RNA, 19 nt, Artificial Sequence
  Description of Artificial Sequence: Synthetic oligonucleotide
ccugggccgcacgcauuac

SEQ ID NO: 1659 - RNA, 19 nt, Artificial Sequence
  Description of Artificial Sequence: Synthetic oligonucleotide
cugggccgcacgcauuaca

SEQ ID NO: 1660 - RNA, 19 nt, Artificial Sequence
  Description of Artificial Sequence: Synthetic oligonucleotide
ugggccgcacgcauuacag

SEQ ID NO: 1661 - RNA, 19 nt, Artificial Sequence
  Description of Artificial Sequence: Synthetic oligonucleotide
gggccgcacgcauuacagc

SEQ ID NO: 1662 - RNA, 19 nt, Artificial Sequence
  Description of Artificial Sequence: Synthetic oligonucleotide
ggccgcacgcauuacagcc

SEQ ID NO: 1663 - RNA, 19 nt, Artificial Sequence
  Description of Artificial Sequence: Synthetic oligonucleotide
gccgcacgcauuacagcca

SEQ ID NO: 1664 - RNA, 19 nt, Artificial Sequence
  Description of Artificial Sequence: Synthetic oligonucleotide
ccgcacgcauuacagccag

SEQ ID NO: 1665 - RNA, 19 nt, Artificial Sequence
  Description of Artificial Sequence: Synthetic oligonucleotide
cgcacgcauuacagccagc

SEQ ID NO: 1666 - RNA, 19 nt, Artificial Sequence
  Description of Artificial Sequence: Synthetic oligonucleotide
gcacgcauuacagccagcu

SEQ ID NO: 1667 - RNA, 19 nt, Artificial Sequence
  Description of Artificial Sequence: Synthetic oligonucleotide
cacgcauuacagccagcug

SEQ ID NO: 1668 - RNA, 19 nt, Artificial Sequence
  Description of Artificial Sequence: Synthetic oligonucleotide
acgcauuacagccagcugc

SEQ ID NO: 1669 - RNA, 19 nt, Artificial Sequence
  Description of Artificial Sequence: Synthetic oligonucleotide
cgcauuacagccagcugcg

SEQ ID NO: 1670 - RNA, 19 nt, Artificial Sequence
  Description of Artificial Sequence: Synthetic oligonucleotide
gcauuacagccagcugcgc

SEQ ID NO: 1671 - RNA, 19 nt, Artificial Sequence
  Description of Artificial Sequence: Synthetic oligonucleotide
cauuacagccagcugcgca

SEQ ID NO: 1672 - RNA, 19 nt, Artificial Sequence
  Description of Artificial Sequence: Synthetic oligonucleotide
auuacagccagcugcgcaa

SEQ ID NO: 1673 - RNA, 19 nt, Artificial Sequence
  Description of Artificial Sequence: Synthetic oligonucleotide
uuacagccagcugcgcaag

SEQ ID NO: 1674 - RNA, 19 nt, Artificial Sequence
  Description of Artificial Sequence: Synthetic oligonucleotide
uacagccagcugcgcaaga

SEQ ID NO: 1675 - RNA, 19 nt, Artificial Sequence
  Description of Artificial Sequence: Synthetic oligonucleotide
acagccagcugcgcaagaa

SEQ ID NO: 1676 - RNA, 19 nt, Artificial Sequence
  Description of Artificial Sequence: Synthetic oligonucleotide
cagccagcugcgcaagaag

SEQ ID NO: 1677 - RNA, 19 nt, Artificial Sequence
  Description of Artificial Sequence: Synthetic oligonucleotide
agccagcugcgcaagaaga

SEQ ID NO: 1678 - RNA, 19 nt, Artificial Sequence
  Description of Artificial Sequence: Synthetic oligonucleotide
gccagcugcgcaagaagag

SEQ ID NO: 1679 - RNA, 19 nt, Artificial Sequence
  Description of Artificial Sequence: Synthetic oligonucleotide
ccagcugcgcaagaagagc

SEQ ID NO: 1680 - RNA, 19 nt, Artificial Sequence
  Description of Artificial Sequence: Synthetic oligonucleotide
cagcugcgcaagaagagcu

SEQ ID NO: 1681 - RNA, 19 nt, Artificial Sequence
  Description of Artificial Sequence: Synthetic oligonucleotide
agcugcgcaagaagagcug

SEQ ID NO: 1682 - RNA, 19 nt, Artificial Sequence
  Description of Artificial Sequence: Synthetic oligonucleotide
gcugcgcaagaagagcuga

SEQ ID NO: 1683 - RNA, 19 nt, Artificial Sequence
  Description of Artificial Sequence: Synthetic oligonucleotide
cugcgcaagaagagcugag

SEQ ID NO: 1684 - RNA, 19 nt, Artificial Sequence
  Description of Artificial Sequence: Synthetic oligonucleotide
ugcgcaagaagagcugagu

SEQ ID NO: 1685 - RNA, 19 nt, Artificial Sequence
  Description of Artificial Sequence: Synthetic oligonucleotide
gcgcaagaagagcugaguc

SEQ ID NO: 1686 - RNA, 19 nt, Artificial Sequence
  Description of Artificial Sequence: Synthetic oligonucleotide
cgcaagaagagcugagucg

SEQ ID NO: 1687 - RNA, 19 nt, Artificial Sequence
  Description of Artificial Sequence: Synthetic oligonucleotide
gcaagaagagcugagucgc

SEQ ID NO: 1688 - RNA, 19 nt, Artificial Sequence
  Description of Artificial Sequence: Synthetic oligonucleotide
caagaagagcugagucgcc

SEQ ID NO: 1689 - RNA, 19 nt, Artificial Sequence
  Description of Artificial Sequence: Synthetic oligonucleotide
aagaagagcugagucgccg

SEQ ID NO: 1690 - RNA, 19 nt, Artificial Sequence
  Description of Artificial Sequence: Synthetic oligonucleotide
agaagagcugagucgccgc

SEQ ID NO: 1691 - RNA, 19 nt, Artificial Sequence
  Description of Artificial Sequence: Synthetic oligonucleotide
gaagagcugagucgccgca

SEQ ID NO: 1692 - RNA, 19 nt, Artificial Sequence
  Description of Artificial Sequence: Synthetic oligonucleotide
aagagcugagucgccgcac

SEQ ID NO: 1693 - RNA, 19 nt, Artificial Sequence
  Description of Artificial Sequence: Synthetic oligonucleotide
agagcugagucgccgcacc

SEQ ID NO: 1694 - RNA, 19 nt, Artificial Sequence
  Description of Artificial Sequence: Synthetic oligonucleotide
gagcugagucgccgcacca

SEQ ID NO: 1695 - RNA, 19 nt, Artificial Sequence
  Description of Artificial Sequence: Synthetic oligonucleotide
agcugagucgccgcaccag

SEQ ID NO: 1696 - RNA, 19 nt, Artificial Sequence
  Description of Artificial Sequence: Synthetic oligonucleotide
gcugagucgccgcaccagc

SEQ ID NO: 1697 - RNA, 19 nt, Artificial Sequence
  Description of Artificial Sequence: Synthetic oligonucleotide
cugagucgccgcaccagcc

SEQ ID NO: 1698 - RNA, 19 nt, Artificial Sequence
  Description of Artificial Sequence: Synthetic oligonucleotide
ugagucgccgcaccagccg

SEQ ID NO: 1699 - RNA, 19 nt, Artificial Sequence
  Description of Artificial Sequence: Synthetic oligonucleotide
gagucgccgcaccagccgc

SEQ ID NO: 1700 - RNA, 19 nt, Artificial Sequence
  Description of Artificial Sequence: Synthetic oligonucleotide
agucgccgcaccagccgcc

SEQ ID NO: 1701 - RNA, 19 nt, Artificial Sequence
  Description of Artificial Sequence: Synthetic oligonucleotide
gucgccgcaccagccgccg

SEQ ID NO: 1702 - RNA, 19 nt, Artificial Sequence
  Description of Artificial Sequence: Synthetic oligonucleotide
ucgccgcaccagccgccgc

SEQ ID NO: 1703 - RNA, 19 nt, Artificial Sequence
  Description of Artificial Sequence: Synthetic oligonucleotide
cgccgcaccagccgccgcg

SEQ ID NO: 1704 - RNA, 19 nt, Artificial Sequence
  Description of Artificial Sequence: Synthetic oligonucleotide
gccgcaccagccgccgcgc

SEQ ID NO: 1705 - RNA, 19 nt, Artificial Sequence
  Description of Artificial Sequence: Synthetic oligonucleotide
ccgcaccagccgccgcgcc

SEQ ID NO: 1706 - RNA, 19 nt, Artificial Sequence
  Description of Artificial Sequence: Synthetic oligonucleotide
cgcaccagccgccgcgccc

SEQ ID NO: 1707 - RNA, 19 nt, Artificial Sequence
  Description of Artificial Sequence: Synthetic oligonucleotide
gcaccagccgccgcgcccc

SEQ ID NO: 1708 - RNA, 19 nt, Artificial Sequence
  Description of Artificial Sequence: Synthetic oligonucleotide
caccagccgccgcgccccg

SEQ ID NO: 1709 - RNA, 19 nt, Artificial Sequence
  Description of Artificial Sequence: Synthetic oligonucleotide
accagccgccgcgccccgg

SEQ ID NO: 1710 - RNA, 19 nt, Artificial Sequence
  Description of Artificial Sequence: Synthetic oligonucleotide
ccagccgccgcgccccggg

SEQ ID NO: 1711 - RNA, 19 nt, Artificial Sequence
  Description of Artificial Sequence: Synthetic oligonucleotide
cagccgccgcgccccgggc

SEQ ID NO: 1712 - RNA, 19 nt, Artificial Sequence
  Description of Artificial Sequence: Synthetic oligonucleotide
agccgccgcgccccgggcc

SEQ ID NO: 1713 - RNA, 19 nt, Artificial Sequence
  Description of Artificial Sequence: Synthetic oligonucleotide
gccgccgcgccccgggccg

SEQ ID NO: 1714 - RNA, 19 nt, Artificial Sequence
  Description of Artificial Sequence: Synthetic oligonucleotide
ccgccgcgccccgggccgg

SEQ ID NO: 1715 - RNA, 19 nt, Artificial Sequence
  Description of Artificial Sequence: Synthetic oligonucleotide
cgccgcgccccgggccggc

SEQ ID NO: 1716 - RNA, 19 nt, Artificial Sequence
  Description of Artificial Sequence: Synthetic oligonucleotide
gccgcgccccgggccggcg

SEQ ID NO: 1717 - RNA, 19 nt, Artificial Sequence
  Description of Artificial Sequence: Synthetic oligonucleotide
ccgcgccccgggccggcgg

SEQ ID NO: 1718 - RNA, 19 nt, Artificial Sequence
  Description of Artificial Sequence: Synthetic oligonucleotide
cgcgccccgggccggcggg

SEQ ID NO: 1719 - RNA, 19 nt, Artificial Sequence
  Description of Artificial Sequence: Synthetic oligonucleotide
gcgccccgggccggcgggu

SEQ ID NO: 1720 - RNA, 19 nt, Artificial Sequence
  Description of Artificial Sequence: Synthetic oligonucleotide
cgccccgggccggcggguu

SEQ ID NO: 1721 - RNA, 19 nt, Artificial Sequence
  Description of Artificial Sequence: Synthetic oligonucleotide
gccccgggccggcggguuu

SEQ ID NO: 1722 - RNA, 19 nt, Artificial Sequence
  Description of Artificial Sequence: Synthetic oligonucleotide
ccccgggccggcggguuuc

SEQ ID NO: 1723 - RNA, 19 nt, Artificial Sequence
  Description of Artificial Sequence: Synthetic oligonucleotide
cccgggccggcggguuucu

SEQ ID NO: 1724 - RNA, 19 nt, Artificial Sequence
  Description of Artificial Sequence: Synthetic oligonucleotide
ccgggccggcggguuucuc

SEQ ID NO: 1725 - RNA, 19 nt, Artificial Sequence
  Description of Artificial Sequence: Synthetic oligonucleotide
cgggccggcggguuucucu

SEQ ID NO: 1726 - RNA, 19 nt, Artificial Sequence
  Description of Artificial Sequence: Synthetic oligonucleotide
gggccggcggguuucucua

SEQ ID NO: 1727 - RNA, 19 nt, Artificial Sequence
  Description of Artificial Sequence: Synthetic oligonucleotide
ggccggcggguuucucuaa

SEQ ID NO: 1728 - RNA, 19 nt, Artificial Sequence
  Description of Artificial Sequence: Synthetic oligonucleotide
gccggcggguuucucuaac

SEQ ID NO: 1729 - RNA, 19 nt, Artificial Sequence
  Description of Artificial Sequence: Synthetic oligonucleotide
ccggcggguuucucuaaca

SEQ ID NO: 1730 - RNA, 19 nt, Artificial Sequence
  Description of Artificial Sequence: Synthetic oligonucleotide
cggcggguuucucuaacaa

SEQ ID NO: 1731 - RNA, 19 nt, Artificial Sequence
  Description of Artificial Sequence: Synthetic oligonucleotide
ggcggguuucucuaacaaa

SEQ ID NO: 1732 - RNA, 19 nt, Artificial Sequence
  Description of Artificial Sequence: Synthetic oligonucleotide
gcggguuucucuaacaaau

SEQ ID NO: 1733 - RNA, 19 nt, Artificial Sequence
  Description of Artificial Sequence: Synthetic oligonucleotide
cggguuucucuaacaaaua

SEQ ID NO: 1734 - RNA, 19 nt, Artificial Sequence
  Description of Artificial Sequence: Synthetic oligonucleotide
ggguuucucuaacaaauaa

SEQ ID NO: 1735 - RNA, 19 nt, Artificial Sequence
  Description of Artificial Sequence: Synthetic oligonucleotide
gguuucucuaacaaauaaa

SEQ ID NO: 1736 - RNA, 19 nt, Artificial Sequence
  Description of Artificial Sequence: Synthetic oligonucleotide
guuucucuaacaaauaaac

SEQ ID NO: 1737 - RNA, 19 nt, Artificial Sequence
  Description of Artificial Sequence: Synthetic oligonucleotide
uuucucuaacaaauaaaca

SEQ ID NO: 1738 - RNA, 19 nt, Artificial Sequence
  Description of Artificial Sequence: Synthetic oligonucleotide
uucucuaacaaauaaacag

SEQ ID NO: 1739 - RNA, 19 nt, Artificial Sequence
  Description of Artificial Sequence: Synthetic oligonucleotide
ucucuaacaaauaaacaga

SEQ ID NO: 1740 - RNA, 19 nt, Artificial Sequence
  Description of Artificial Sequence: Synthetic oligonucleotide
cucuaacaaauaaacagaa

SEQ ID NO: 1741 - RNA, 19 nt, Artificial Sequence
  Description of Artificial Sequence: Synthetic oligonucleotide
ucuaacaaauaaacagaac

SEQ ID NO: 1742 - RNA, 19 nt, Artificial Sequence
  Description of Artificial Sequence: Synthetic oligonucleotide
cuaacaaauaaacagaacc

SEQ ID NO: 1743 - RNA, 19 nt, Artificial Sequence
  Description of Artificial Sequence: Synthetic oligonucleotide
uaacaaauaaacagaaccc

SEQ ID NO: 1744 - RNA, 19 nt, Artificial Sequence
  Description of Artificial Sequence: Synthetic oligonucleotide
aacaaauaaacagaacccg

SEQ ID NO: 1745 - RNA, 19 nt, Artificial Sequence
  Description of Artificial Sequence: Synthetic oligonucleotide
acaaauaaacagaacccgc

SEQ ID NO: 1746 - RNA, 19 nt, Artificial Sequence
  Description of Artificial Sequence: Synthetic oligonucleotide
caaauaaacagaacccgca

SEQ ID NO: 1747 - RNA, 19 nt, Artificial Sequence
  Description of Artificial Sequence: Synthetic oligonucleotide
aaauaaacagaacccgcac

SEQ ID NO: 1748 - RNA, 19 nt, Artificial Sequence
  Description of Artificial Sequence: Synthetic oligonucleotide
aauaaacagaacccgcacu

SEQ ID NO: 1749 - RNA, 19 nt, Artificial Sequence
  Description of Artificial Sequence: Synthetic oligonucleotide
auaaacagaacccgcacug

SEQ ID NO: 1750 - RNA, 19 nt, Artificial Sequence
  Description of Artificial Sequence: Synthetic oligonucleotide
uaaacagaacccgcacugc

SEQ ID NO: 1751 - RNA, 19 nt, Artificial Sequence
  Description of Artificial Sequence: Synthetic oligonucleotide
aaacagaacccgcacugcc

SEQ ID NO: 1752 - RNA, 19 nt, Artificial Sequence
  Description of Artificial Sequence: Synthetic oligonucleotide
aacagaacccgcacugccc

SEQ ID NO: 1753 - RNA, 19 nt, Artificial Sequence
  Description of Artificial Sequence: Synthetic oligonucleotide
acagaacccgcacugccca

SEQ ID NO: 1754 - RNA, 19 nt, Artificial Sequence
  Description of Artificial Sequence: Synthetic oligonucleotide
cagaacccgcacugcccag

SEQ ID NO: 1755 - RNA, 19 nt, Artificial Sequence
  Description of Artificial Sequence: Synthetic oligonucleotide
agaacccgcacugcccagg

SEQ ID NO: 1756 - RNA, 19 nt, Artificial Sequence
  Description of Artificial Sequence: Synthetic oligonucleotide
gaacccgcacugcccaggc

SEQ ID NO: 1757 - RNA, 19 nt, Artificial Sequence
  Description of Artificial Sequence: Synthetic oligonucleotide
aacccgcacugcccaggcg

SEQ ID NO: 1758 - RNA, 19 nt, Artificial Sequence
  Description of Artificial Sequence: Synthetic oligonucleotide
acccgcacugcccaggcga

SEQ ID NO: 1759 - RNA, 19 nt, Artificial Sequence
  Description of Artificial Sequence: Synthetic oligonucleotide
cccgcacugcccaggcgag

SEQ ID NO: 1760 - RNA, 19 nt, Artificial Sequence
  Description of Artificial Sequence: Synthetic oligonucleotide
ccgcacugcccaggcgagc

SEQ ID NO: 1761 - RNA, 19 nt, Artificial Sequence
  Description of Artificial Sequence: Synthetic oligonucleotide
cgcacugcccaggcgagcg

SEQ ID NO: 1762 - RNA, 19 nt, Artificial Sequence
  Description of Artificial Sequence: Synthetic oligonucleotide
gcacugcccaggcgagcgu

SEQ ID NO: 1763 - RNA, 19 nt, Artificial Sequence
  Description of Artificial Sequence: Synthetic oligonucleotide
cacugcccaggcgagcguu

SEQ ID NO: 1764 - RNA, 19 nt, Artificial Sequence
  Description of Artificial Sequence: Synthetic oligonucleotide
acugcccaggcgagcguug

SEQ ID NO: 1765 - RNA, 19 nt, Artificial Sequence
  Description of Artificial Sequence: Synthetic oligonucleotide
cugcccaggcgagcguugc

SEQ ID NO: 1766 - RNA, 19 nt, Artificial Sequence
  Description of Artificial Sequence: Synthetic oligonucleotide
ugcccaggcgagcguugcc

SEQ ID NO: 1767 - RNA, 19 nt, Artificial Sequence
  Description of Artificial Sequence: Synthetic oligonucleotide
gcccaggcgagcguugcca

SEQ ID NO: 1768 - RNA, 19 nt, Artificial Sequence
  Description of Artificial Sequence: Synthetic oligonucleotide
cccaggcgagcguugccac

SEQ ID NO: 1769 - RNA, 19 nt, Artificial Sequence
  Description of Artificial Sequence: Synthetic oligonucleotide
ccaggcgagcguugccacu

SEQ ID NO: 1770 - RNA, 19 nt, Artificial Sequence
  Description of Artificial Sequence: Synthetic oligonucleotide
caggcgagcguugccacuu

SEQ ID NO: 1771 - RNA, 19 nt, Artificial Sequence
  Description of Artificial Sequence: Synthetic oligonucleotide
aggcgagcguugccacuuu

SEQ ID NO: 1772 - RNA, 19 nt, Artificial Sequence
  Description of Artificial Sequence: Synthetic oligonucleotide
ggcgagcguugccacuuuc

SEQ ID NO: 1773 - RNA, 19 nt, Artificial Sequence
  Description of Artificial Sequence: Synthetic oligonucleotide
gcgagcguugccacuuuca

SEQ ID NO: 1774 - RNA, 19 nt, Artificial Sequence
  Description of Artificial Sequence: Synthetic oligonucleotide
cgagcguugccacuuucaa

SEQ ID NO: 1775 - RNA, 19 nt, Artificial Sequence
  Description of Artificial Sequence: Synthetic oligonucleotide
gagcguugccacuuucaaa

SEQ ID NO: 1776 - RNA, 19 nt, Artificial Sequence
  Description of Artificial Sequence: Synthetic oligonucleotide
agcguugccacuuucaaag

SEQ ID NO: 1777 - RNA, 19 nt, Artificial Sequence
  Description of Artificial Sequence: Synthetic oligonucleotide
gcguugccacuuucaaagu

SEQ ID NO: 1778 - RNA, 19 nt, Artificial Sequence
  Description of Artificial Sequence: Synthetic oligonucleotide
cguugccacuuucaaagug

SEQ ID NO: 1779 - RNA, 19 nt, Artificial Sequence
  Description of Artificial Sequence: Synthetic oligonucleotide
guugccacuuucaaagugg

SEQ ID NO: 1780 - RNA, 19 nt, Artificial Sequence
  Description of Artificial Sequence: Synthetic oligonucleotide
uugccacuuucaaaguggu

SEQ ID NO: 1781 - RNA, 19 nt, Artificial Sequence
  Description of Artificial Sequence: Synthetic oligonucleotide
ugccacuuucaaagugguc

SEQ ID NO: 1782 - RNA, 19 nt, Artificial Sequence
  Description of Artificial Sequence: Synthetic oligonucleotide
gccacuuucaaaguggucc

SEQ ID NO: 1783 - RNA, 19 nt, Artificial Sequence
  Description of Artificial Sequence: Synthetic oligonucleotide
ccacuuucaaagugguccc

SEQ ID NO: 1784 - RNA, 19 nt, Artificial Sequence
  Description of Artificial Sequence: Synthetic oligonucleotide
cacuuucaaaguggucccc

SEQ ID NO: 1785 - RNA, 19 nt, Artificial Sequence
  Description of Artificial Sequence: Synthetic oligonucleotide
acuuucaaagugguccccu

SEQ ID NO: 1786 - RNA, 19 nt, Artificial Sequence
  Description of Artificial Sequence: Synthetic oligonucleotide
cuuucaaagugguccccug

SEQ ID NO: 1787 - RNA, 19 nt, Artificial Sequence
  Description of Artificial Sequence: Synthetic oligonucleotide
uuucaaagugguccccugg

SEQ ID NO: 1788 - RNA, 19 nt, Artificial Sequence
  Description of Artificial Sequence: Synthetic oligonucleotide
uucaaagugguccccuggg

SEQ ID NO: 1789 - RNA, 19 nt, Artificial Sequence
  Description of Artificial Sequence: Synthetic oligonucleotide
ucaaagugguccccugggg

SEQ ID NO: 1790 - RNA, 19 nt, Artificial Sequence
  Description of Artificial Sequence: Synthetic oligonucleotide
caaagugguccccugggga

SEQ ID NO: 1791 - RNA, 19 nt, Artificial Sequence
  Description of Artificial Sequence: Synthetic oligonucleotide
aaagugguccccuggggag

SEQ ID NO: 1792 - RNA, 19 nt, Artificial Sequence
  Description of Artificial Sequence: Synthetic oligonucleotide
aagugguccccuggggagc

SEQ ID NO: 1793 - RNA, 19 nt, Artificial Sequence
  Description of Artificial Sequence: Synthetic oligonucleotide
agugguccccuggggagcu

SEQ ID NO: 1794 - RNA, 19 nt, Artificial Sequence
  Description of Artificial Sequence: Synthetic oligonucleotide
gugguccccuggggagcuc

SEQ ID NO: 1795 - RNA, 19 nt, Artificial Sequence
  Description of Artificial Sequence: Synthetic oligonucleotide
ugguccccuggggagcuca

SEQ ID NO: 1796 - RNA, 19 nt, Artificial Sequence
  Description of Artificial Sequence: Synthetic oligonucleotide
gguccccuggggagcucag

SEQ ID NO: 1797 - RNA, 19 nt, Artificial Sequence
  Description of Artificial Sequence: Synthetic oligonucleotide
guccccuggggagcucagc

SEQ ID NO: 1798 - RNA, 19 nt, Artificial Sequence
  Description of Artificial Sequence: Synthetic oligonucleotide
uccccuggggagcucagcc

SEQ ID NO: 1799 - RNA, 19 nt, Artificial Sequence
  Description of Artificial Sequence: Synthetic oligonucleotide
ccccuggggagcucagccu

SEQ ID NO: 1800 - RNA, 19 nt, Artificial Sequence
  Description of Artificial Sequence: Synthetic oligonucleotide
cccuggggagcucagccuc

SEQ ID NO: 1801 - RNA, 19 nt, Artificial Sequence
  Description of Artificial Sequence: Synthetic oligonucleotide
ccuggggagcucagccuca

SEQ ID NO: 1802 - RNA, 19 nt, Artificial Sequence
  Description of Artificial Sequence: Synthetic oligonucleotide
cuggggagcucagccucau

SEQ ID NO: 1803 - RNA, 19 nt, Artificial Sequence
  Description of Artificial Sequence: Synthetic oligonucleotide
uggggagcucagccucauc

SEQ ID NO: 1804 - RNA, 19 nt, Artificial Sequence
  Description of Artificial Sequence: Synthetic oligonucleotide
ggggagcucagccucaucc

SEQ ID NO: 1805 - RNA, 19 nt, Artificial Sequence
  Description of Artificial Sequence: Synthetic oligonucleotide
gggagcucagccucauccu

SEQ ID NO: 1806 - RNA, 19 nt, Artificial Sequence
  Description of Artificial Sequence: Synthetic oligonucleotide
ggagcucagccucauccug

SEQ ID NO: 1807 - RNA, 19 nt, Artificial Sequence
  Description of Artificial Sequence: Synthetic oligonucleotide
gagcucagccucauccuga

SEQ ID NO: 1808 - RNA, 19 nt, Artificial Sequence
  Description of Artificial Sequence: Synthetic oligonucleotide
agcucagccucauccugau

SEQ ID NO: 1809 - RNA, 19 nt, Artificial Sequence
  Description of Artificial Sequence: Synthetic oligonucleotide
gcucagccucauccugaug

SEQ ID NO: 1810 - RNA, 19 nt, Artificial Sequence
  Description of Artificial Sequence: Synthetic oligonucleotide
cucagccucauccugauga

SEQ ID NO: 1811 - RNA, 19 nt, Artificial Sequence
  Description of Artificial Sequence: Synthetic oligonucleotide
ucagccucauccugaugau

SEQ ID NO: 1812 - RNA, 19 nt, Artificial Sequence
  Description of Artificial Sequence: Synthetic oligonucleotide
cagccucauccugaugaug

SEQ ID NO: 1813 - RNA, 19 nt, Artificial Sequence
  Description of Artificial Sequence: Synthetic oligonucleotide
agccucauccugaugaugc

SEQ ID NO: 1814 - RNA, 19 nt, Artificial Sequence
  Description of Artificial Sequence: Synthetic oligonucleotide
gccucauccugaugaugcu

SEQ ID NO: 1815 - RNA, 19 nt, Artificial Sequence
  Description of Artificial Sequence: Synthetic oligonucleotide
ccucauccugaugaugcug

SEQ ID NO: 1816 - RNA, 19 nt, Artificial Sequence
  Description of Artificial Sequence: Synthetic oligonucleotide
cucauccugaugaugcugc

SEQ ID NO: 1817 - RNA, 19 nt, Artificial Sequence
  Description of Artificial Sequence: Synthetic oligonucleotide
ucauccugaugaugcugcc

SEQ ID NO: 1818 - RNA, 19 nt, Artificial Sequence
  Description of Artificial Sequence: Synthetic oligonucleotide
cauccugaugaugcugcca

SEQ ID NO: 1819 - RNA, 19 nt, Artificial Sequence
  Description of Artificial Sequence: Synthetic oligonucleotide
auccugaugaugcugccaa

SEQ ID NO: 1820 - RNA, 19 nt, Artificial Sequence
  Description of Artificial Sequence: Synthetic oligonucleotide
uccugaugaugcugccaag

SEQ ID NO: 1821 - RNA, 19 nt, Artificial Sequence
  Description of Artificial Sequence: Synthetic oligonucleotide
ccugaugaugcugccaagg

SEQ ID NO: 1822 - RNA, 19 nt, Artificial Sequence
  Description of Artificial Sequence: Synthetic oligonucleotide
cugaugaugcugccaaggc

SEQ ID NO: 1823 - RNA, 19 nt, Artificial Sequence
  Description of Artificial Sequence: Synthetic oligonucleotide
ugaugaugcugccaaggcg

SEQ ID NO: 1824 - RNA, 19 nt, Artificial Sequence
  Description of Artificial Sequence: Synthetic oligonucleotide
gaugaugcugccaaggcgc

SEQ ID NO: 1825 - RNA, 19 nt, Artificial Sequence
  Description of Artificial Sequence: Synthetic oligonucleotide
augaugcugccaaggcgca

SEQ ID NO: 1826 - RNA, 19 nt, Artificial Sequence
  Description of Artificial Sequence: Synthetic oligonucleotide
ugaugcugccaaggcgcac

SEQ ID NO: 1827 - RNA, 19 nt, Artificial Sequence
  Description of Artificial Sequence: Synthetic oligonucleotide
gaugcugccaaggcgcacu

SEQ ID NO: 1828 - RNA, 19 nt, Artificial Sequence
  Description of Artificial Sequence: Synthetic oligonucleotide
augcugccaaggcgcacuu

SEQ ID NO: 1829 - RNA, 19 nt, Artificial Sequence
  Description of Artificial Sequence: Synthetic oligonucleotide
ugcugccaaggcgcacuuu

SEQ ID NO: 1830 - RNA, 19 nt, Artificial Sequence
  Description of Artificial Sequence: Synthetic oligonucleotide
gcugccaaggcgcacuuuu

SEQ ID NO: 1831 - RNA, 19 nt, Artificial Sequence
  Description of Artificial Sequence: Synthetic oligonucleotide
cugccaaggcgcacuuuuu

SEQ ID NO: 1832 - RNA, 19 nt, Artificial Sequence
  Description of Artificial Sequence: Synthetic oligonucleotide
ugccaaggcgcacuuuuua

SEQ ID NO: 1833 - RNA, 19 nt, Artificial Sequence
  Description of Artificial Sequence: Synthetic oligonucleotide
gccaaggcgcacuuuuuau

SEQ ID NO: 1834 - RNA, 19 nt, Artificial Sequence
  Description of Artificial Sequence: Synthetic oligonucleotide
ccaaggcgcacuuuuuauu

SEQ ID NO: 1835 - RNA, 19 nt, Artificial Sequence
  Description of Artificial Sequence: Synthetic oligonucleotide
caaggcgcacuuuuuauuu

SEQ ID NO: 1836 - RNA, 19 nt, Artificial Sequence
  Description of Artificial Sequence: Synthetic oligonucleotide
aaggcgcacuuuuuauuuu

SEQ ID NO: 1837 - RNA, 19 nt, Artificial Sequence
  Description of Artificial Sequence: Synthetic oligonucleotide
aggcgcacuuuuuauuuuu

SEQ ID NO: 1838 - RNA, 19 nt, Artificial Sequence
  Description of Artificial Sequence: Synthetic oligonucleotide
ggcgcacuuuuuauuuuua

SEQ ID NO: 1839 - RNA, 19 nt, Artificial Sequence
  Description of Artificial Sequence: Synthetic oligonucleotide
gcgcacuuuuuauuuuuau

SEQ ID NO: 1840 - RNA, 19 nt, Artificial Sequence
  Description of Artificial Sequence: Synthetic oligonucleotide
cgcacuuuuuauuuuuauu

SEQ ID NO: 1841 - RNA, 19 nt, Artificial Sequence
  Description of Artificial Sequence: Synthetic oligonucleotide
gcacuuuuuauuuuuauuu

SEQ ID NO: 1842 - RNA, 19 nt, Artificial Sequence
  Description of Artificial Sequence: Synthetic oligonucleotide
cacuuuuuauuuuuauuuu

SEQ ID NO: 1843 - RNA, 19 nt, Artificial Sequence
  Description of Artificial Sequence: Synthetic oligonucleotide
acuuuuuauuuuuauuuua

SEQ ID NO: 1844 - RNA, 19 nt, Artificial Sequence
  Description of Artificial Sequence: Synthetic oligonucleotide
cuuuuuauuuuuauuuuau

SEQ ID NO: 1845 - RNA, 19 nt, Artificial Sequence
  Description of Artificial Sequence: Synthetic oligonucleotide
uuuuuauuuuuauuuuauu

SEQ ID NO: 1846 - RNA, 19 nt, Artificial Sequence
  Description of Artificial Sequence: Synthetic oligonucleotide
uuuuauuuuuauuuuauuu

SEQ ID NO: 1847 - RNA, 19 nt, Artificial Sequence
  Description of Artificial Sequence: Synthetic oligonucleotide
uuuauuuuuauuuuauuuu

SEQ ID NO: 1848 - RNA, 19 nt, Artificial Sequence
  Description of Artificial Sequence: Synthetic oligonucleotide
uuauuuuuauuuuauuuuu

SEQ ID NO: 1849 - RNA, 19 nt, Artificial Sequence
  Description of Artificial Sequence: Synthetic oligonucleotide
uauuuuuauuuuauuuuua

SEQ ID NO: 1850 - RNA, 19 nt, Artificial Sequence
  Description of Artificial Sequence: Synthetic oligonucleotide
auuuuuauuuuauuuuuau

SEQ ID NO: 1851 - RNA, 19 nt, Artificial Sequence
  Description of Artificial Sequence: Synthetic oligonucleotide
uuuuuauuuuauuuuuauu

SEQ ID NO: 1852 - RNA, 19 nt, Artificial Sequence
  Description of Artificial Sequence: Synthetic oligonucleotide
uuuuauuuuauuuuuauuu

SEQ ID NO: 1853 - RNA, 19 nt, Artificial Sequence
  Description of Artificial Sequence: Synthetic oligonucleotide
uuuauuuuauuuuuauuuu

SEQ ID NO: 1854 - RNA, 19 nt, Artificial Sequence
  Description of Artificial Sequence: Synthetic oligonucleotide
uuauuuuauuuuuauuuuu

SEQ ID NO: 1855 - RNA, 19 nt, Artificial Sequence
  Description of Artificial Sequence: Synthetic oligonucleotide
uauuuuauuuuuauuuuuu

SEQ ID NO: 1856 - RNA, 19 nt, Artificial Sequence
  Description of Artificial Sequence: Synthetic oligonucleotide
auuuuauuuuuauuuuuuu

SEQ ID NO: 1857 - RNA, 19 nt, Artificial Sequence
  Description of Artificial Sequence: Synthetic oligonucleotide
uuuuauuuuuauuuuuuuu

SEQ ID NO: 1858 - RNA, 19 nt, Artificial Sequence
  Description of Artificial Sequence: Synthetic oligonucleotide
uuuauuuuuauuuuuuuuu

SEQ ID NO: 1859 - RNA, 19 nt, Artificial Sequence
  Description of Artificial Sequence: Synthetic oligonucleotide
uuauuuuuauuuuuuuuuu

SEQ ID NO: 1860 - RNA, 19 nt, Artificial Sequence
  Description of Artificial Sequence: Synthetic oligonucleotide
uauuuuuauuuuuuuuuua

SEQ ID NO: 1861 - RNA, 19 nt, Artificial Sequence
  Description of Artificial Sequence: Synthetic oligonucleotide
auuuuuauuuuuuuuuuag

SEQ ID NO: 1862 - RNA, 19 nt, Artificial Sequence
  Description of Artificial Sequence: Synthetic oligonucleotide
uuuuuauuuuuuuuuuagc

SEQ ID NO: 1863 - RNA, 19 nt, Artificial Sequence
  Description of Artificial Sequence: Synthetic oligonucleotide
uuuuauuuuuuuuuuagca

SEQ ID NO: 1864 - RNA, 19 nt, Artificial Sequence
  Description of Artificial Sequence: Synthetic oligonucleotide
uuuauuuuuuuuuuagcau

SEQ ID NO: 1865 - RNA, 19 nt, Artificial Sequence
  Description of Artificial Sequence: Synthetic oligonucleotide
uuauuuuuuuuuuagcauc

SEQ ID NO: 1866 - RNA, 19 nt, Artificial Sequence
  Description of Artificial Sequence: Synthetic oligonucleotide
uauuuuuuuuuuagcaucc

SEQ ID NO: 1867 - RNA, 19 nt, Artificial Sequence
  Description of Artificial Sequence: Synthetic oligonucleotide
auuuuuuuuuuagcauccu

SEQ ID NO: 1868 - RNA, 19 nt, Artificial Sequence
  Description of Artificial Sequence: Synthetic oligonucleotide
uuuuuuuuuuagcauccuu

SEQ ID NO: 1869 - RNA, 19 nt, Artificial Sequence
  Description of Artificial Sequence: Synthetic oligonucleotide
uuuuuuuuuagcauccuuu

SEQ ID NO: 1870 - RNA, 19 nt, Artificial Sequence
  Description of Artificial Sequence: Synthetic oligonucleotide
uuuuuuuuagcauccuuuu

SEQ ID NO: 1871 - RNA, 19 nt, Artificial Sequence
  Description of Artificial Sequence: Synthetic oligonucleotide
uuuuuuuagcauccuuuug

SEQ ID NO: 1872 - RNA, 19 nt, Artificial Sequence
  Description of Artificial Sequence: Synthetic oligonucleotide
uuuuuuagcauccuuuugg

SEQ ID NO: 1873 - RNA, 19 nt, Artificial Sequence
  Description of Artificial Sequence: Synthetic oligonucleotide
uuuuuagcauccuuuuggg

SEQ ID NO: 1874 - RNA, 19 nt, Artificial Sequence
  Description of Artificial Sequence: Synthetic oligonucleotide
uuuuagcauccuuuugggg

SEQ ID NO: 1875 - RNA, 19 nt, Artificial Sequence
  Description of Artificial Sequence: Synthetic oligonucleotide
uuuagcauccuuuuggggc

SEQ ID NO: 1876 - RNA, 19 nt, Artificial Sequence
  Description of Artificial Sequence: Synthetic oligonucleotide
uuagcauccuuuuggggcu

SEQ ID NO: 1877 - RNA, 19 nt, Artificial Sequence
  Description of Artificial Sequence: Synthetic oligonucleotide
uagcauccuuuuggggcuu

SEQ ID NO: 1878 - RNA, 19 nt, Artificial Sequence
  Description of Artificial Sequence: Synthetic oligonucleotide
agcauccuuuuggggcuuc

SEQ ID NO: 1879 - RNA, 19 nt, Artificial Sequence
  Description of Artificial Sequence: Synthetic oligonucleotide
gcauccuuuuggggcuuca

SEQ ID NO: 1880 - RNA, 19 nt, Artificial Sequence
  Description of Artificial Sequence: Synthetic oligonucleotide
cauccuuuuggggcuucac

SEQ ID NO: 1881 - RNA, 19 nt, Artificial Sequence
  Description of Artificial Sequence: Synthetic oligonucleotide
auccuuuuggggcuucacu

SEQ ID NO: 1882 - RNA, 19 nt, Artificial Sequence
  Description of Artificial Sequence: Synthetic oligonucleotide
uccuuuuggggcuucacuc

SEQ ID NO: 1883 - RNA, 19 nt, Artificial Sequence
  Description of Artificial Sequence: Synthetic oligonucleotide
ccuuuuggggcuucacucu

SEQ ID NO: 1884 - RNA, 19 nt, Artificial Sequence
  Description of Artificial Sequence: Synthetic oligonucleotide
cuuuuggggcuucacucuc

SEQ ID NO: 1885 - RNA, 19 nt, Artificial Sequence
  Description of Artificial Sequence: Synthetic oligonucleotide
uuuuggggcuucacucuca

SEQ ID NO: 1886 - RNA, 19 nt, Artificial Sequence
  Description of Artificial Sequence: Synthetic oligonucleotide
uuuggggcuucacucucag

SEQ ID NO: 1887 - RNA, 19 nt, Artificial Sequence
  Description of Artificial Sequence: Synthetic oligonucleotide
uuggggcuucacucucaga

SEQ ID NO: 1888 - RNA, 19 nt, Artificial Sequence
  Description of Artificial Sequence: Synthetic oligonucleotide
uggggcuucacucucagag

SEQ ID NO: 1889 - RNA, 19 nt, Artificial Sequence
  Description of Artificial Sequence: Synthetic oligonucleotide
ggggcuucacucucagagc

SEQ ID NO: 1890 - RNA, 19 nt, Artificial Sequence
  Description of Artificial Sequence: Synthetic oligonucleotide
gggcuucacucucagagcc

SEQ ID NO: 1891 - RNA, 19 nt, Artificial Sequence
  Description of Artificial Sequence: Synthetic oligonucleotide
ggcuucacucucagagcca

SEQ ID NO: 1892 - RNA, 19 nt, Artificial Sequence
  Description of Artificial Sequence: Synthetic oligonucleotide
gcuucacucucagagccag

SEQ ID NO: 1893 - RNA, 19 nt, Artificial Sequence
  Description of Artificial Sequence: Synthetic oligonucleotide
cuucacucucagagccagu

SEQ ID NO: 1894 - RNA, 19 nt, Artificial Sequence
  Description of Artificial Sequence: Synthetic oligonucleotide
uucacucucagagccaguu

SEQ ID NO: 1895 - RNA, 19 nt, Artificial Sequence
  Description of Artificial Sequence: Synthetic oligonucleotide
ucacucucagagccaguuu

SEQ ID NO: 1896 - RNA, 19 nt, Artificial Sequence
  Description of Artificial Sequence: Synthetic oligonucleotide
cacucucagagccaguuuu

SEQ ID NO: 1897 - RNA, 19 nt, Artificial Sequence
  Description of Artificial Sequence: Synthetic oligonucleotide
acucucagagccaguuuuu

SEQ ID NO: 1898 - RNA, 19 nt, Artificial Sequence
  Description of Artificial Sequence: Synthetic oligonucleotide
cucucagagccaguuuuua

SEQ ID NO: 1899 - RNA, 19 nt, Artificial Sequence
  Description of Artificial Sequence: Synthetic oligonucleotide
ucucagagccaguuuuuaa

SEQ ID NO: 1900 - RNA, 19 nt, Artificial Sequence
  Description of Artificial Sequence: Synthetic oligonucleotide
cucagagccaguuuuuaag

SEQ ID NO: 1901 - RNA, 19 nt, Artificial Sequence
  Description of Artificial Sequence: Synthetic oligonucleotide
ucagagccaguuuuuaagg

SEQ ID NO: 1902 - RNA, 19 nt, Artificial Sequence
  Description of Artificial Sequence: Synthetic oligonucleotide
cagagccaguuuuuaaggg

SEQ ID NO: 1903 - RNA, 19 nt, Artificial Sequence
  Description of Artificial Sequence: Synthetic oligonucleotide
agagccaguuuuuaaggga

SEQ ID NO: 1904 - RNA, 19 nt, Artificial Sequence
  Description of Artificial Sequence: Synthetic oligonucleotide
gagccaguuuuuaagggac

SEQ ID NO: 1905 - RNA, 19 nt, Artificial Sequence
  Description of Artificial Sequence: Synthetic oligonucleotide
agccaguuuuuaagggaca

SEQ ID NO: 1906 - RNA, 19 nt, Artificial Sequence
  Description of Artificial Sequence: Synthetic oligonucleotide
gccaguuuuuaagggacac

SEQ ID NO: 1907 - RNA, 19 nt, Artificial Sequence
  Description of Artificial Sequence: Synthetic oligonucleotide
ccaguuuuuaagggacacc

SEQ ID NO: 1908 - RNA, 19 nt, Artificial Sequence
  Description of Artificial Sequence: Synthetic oligonucleotide
caguuuuuaagggacacca

SEQ ID NO: 1909 - RNA, 19 nt, Artificial Sequence
  Description of Artificial Sequence: Synthetic oligonucleotide
aguuuuuaagggacaccag

SEQ ID NO: 1910 - RNA, 19 nt, Artificial Sequence
  Description of Artificial Sequence: Synthetic oligonucleotide
guuuuuaagggacaccaga

SEQ ID NO: 1911 - RNA, 19 nt, Artificial Sequence
  Description of Artificial Sequence: Synthetic oligonucleotide
uuuuuaagggacaccagag

SEQ ID NO: 1912 - RNA, 19 nt, Artificial Sequence
  Description of Artificial Sequence: Synthetic oligonucleotide
uuuuaagggacaccagagc

SEQ ID NO: 1913 - RNA, 19 nt, Artificial Sequence
  Description of Artificial Sequence: Synthetic oligonucleotide
uuuaagggacaccagagcc

SEQ ID NO: 1914 - RNA, 19 nt, Artificial Sequence
  Description of Artificial Sequence: Synthetic oligonucleotide
uuaagggacaccagagccg

SEQ ID NO: 1915 - RNA, 19 nt, Artificial Sequence
  Description of Artificial Sequence: Synthetic oligonucleotide
uaagggacaccagagccgc

SEQ ID NO: 1916 - RNA, 19 nt, Artificial Sequence
  Description of Artificial Sequence: Synthetic oligonucleotide
aagggacaccagagccgca

SEQ ID NO: 1917 - RNA, 19 nt, Artificial Sequence
  Description of Artificial Sequence: Synthetic oligonucleotide
agggacaccagagccgcag

SEQ ID NO: 1918 - RNA, 19 nt, Artificial Sequence
  Description of Artificial Sequence: Synthetic oligonucleotide
gggacaccagagccgcagc

SEQ ID NO: 1919 - RNA, 19 nt, Artificial Sequence
  Description of Artificial Sequence: Synthetic oligonucleotide
ggacaccagagccgcagcc

SEQ ID NO: 1920 - RNA, 19 nt, Artificial Sequence
  Description of Artificial Sequence: Synthetic oligonucleotide
gacaccagagccgcagccu

SEQ ID NO: 1921 - RNA, 19 nt, Artificial Sequence
  Description of Artificial Sequence: Synthetic oligonucleotide
acaccagagccgcagccug

SEQ ID NO: 1922 - RNA, 19 nt, Artificial Sequence
  Description of Artificial Sequence: Synthetic oligonucleotide
caccagagccgcagccugc

SEQ ID NO: 1923 - RNA, 19 nt, Artificial Sequence
  Description of Artificial Sequence: Synthetic oligonucleotide
accagagccgcagccugcu

SEQ ID NO: 1924 - RNA, 19 nt, Artificial Sequence
  Description of Artificial Sequence: Synthetic oligonucleotide
ccagagccgcagccugcuc

SEQ ID NO: 1925 - RNA, 19 nt, Artificial Sequence
  Description of Artificial Sequence: Synthetic oligonucleotide
cagagccgcagccugcucu

SEQ ID NO: 1926 - RNA, 19 nt, Artificial Sequence
  Description of Artificial Sequence: Synthetic oligonucleotide
agagccgcagccugcucug

SEQ ID NO: 1927 - RNA, 19 nt, Artificial Sequence
  Description of Artificial Sequence: Synthetic oligonucleotide
gagccgcagccugcucuga

SEQ ID NO: 1928 - RNA, 19 nt, Artificial Sequence
  Description of Artificial Sequence: Synthetic oligonucleotide
agccgcagccugcucugau

SEQ ID NO: 1929 - RNA, 19 nt, Artificial Sequence
  Description of Artificial Sequence: Synthetic oligonucleotide
gccgcagccugcucugauu

SEQ ID NO: 1930 - RNA, 19 nt, Artificial Sequence
  Description of Artificial Sequence: Synthetic oligonucleotide
ccgcagccugcucugauuc

SEQ ID NO: 1931 - RNA, 19 nt, Artificial Sequence
  Description of Artificial Sequence: Synthetic oligonucleotide
cgcagccugcucugauucu

SEQ ID NO: 1932 - RNA, 19 nt, Artificial Sequence
  Description of Artificial Sequence: Synthetic oligonucleotide
gcagccugcucugauucua

SEQ ID NO: 1933 - RNA, 19 nt, Artificial Sequence
  Description of Artificial Sequence: Synthetic oligonucleotide
cagccugcucugauucuau

SEQ ID NO: 1934 - RNA, 19 nt, Artificial Sequence
  Description of Artificial Sequence: Synthetic oligonucleotide
agccugcucugauucuaug

SEQ ID NO: 1935 - RNA, 19 nt, Artificial Sequence
  Description of Artificial Sequence: Synthetic oligonucleotide
gccugcucugauucuaugg

SEQ ID NO: 1936 - RNA, 19 nt, Artificial Sequence
  Description of Artificial Sequence: Synthetic oligonucleotide
ccugcucugauucuauggc

SEQ ID NO: 1937 - RNA, 19 nt, Artificial Sequence
  Description of Artificial Sequence: Synthetic oligonucleotide
cugcucugauucuauggcu

SEQ ID NO: 1938 - RNA, 19 nt, Artificial Sequence
  Description of Artificial Sequence: Synthetic oligonucleotide
ugcucugauucuauggcuu

SEQ ID NO: 1939 - RNA, 19 nt, Artificial Sequence
  Description of Artificial Sequence: Synthetic oligonucleotide
gcucugauucuauggcuug

SEQ ID NO: 1940 - RNA, 19 nt, Artificial Sequence
  Description of Artificial Sequence: Synthetic oligonucleotide
cucugauucuauggcuugg

SEQ ID NO: 1941 - RNA, 19 nt, Artificial Sequence
  Description of Artificial Sequence: Synthetic oligonucleotide
ucugauucuauggcuuggu

SEQ ID NO: 1942 - RNA, 19 nt, Artificial Sequence
  Description of Artificial Sequence: Synthetic oligonucleotide
cugauucuauggcuugguu

SEQ ID NO: 1943 - RNA, 19 nt, Artificial Sequence
  Description of Artificial Sequence: Synthetic oligonucleotide
ugauucuauggcuugguug

SEQ ID NO: 1944 - RNA, 19 nt, Artificial Sequence
  Description of Artificial Sequence: Synthetic oligonucleotide
gauucuauggcuugguugu

SEQ ID NO: 1945 - RNA, 19 nt, Artificial Sequence
  Description of Artificial Sequence: Synthetic oligonucleotide
auucuauggcuugguuguu

SEQ ID NO: 1946 - RNA, 19 nt, Artificial Sequence
  Description of Artificial Sequence: Synthetic oligonucleotide
uucuauggcuugguuguua

SEQ ID NO: 1947 - RNA, 19 nt, Artificial Sequence
  Description of Artificial Sequence: Synthetic oligonucleotide
ucuauggcuugguuguuac

SEQ ID NO: 1948 - RNA, 19 nt, Artificial Sequence
  Description of Artificial Sequence: Synthetic oligonucleotide
cuauggcuugguuguuacu

SEQ ID NO: 1949 - RNA, 19 nt, Artificial Sequence
  Description of Artificial Sequence: Synthetic oligonucleotide
uauggcuugguuguuacua

SEQ ID NO: 1950 - RNA, 19 nt, Artificial Sequence
  Description of Artificial Sequence: Synthetic oligonucleotide
auggcuugguuguuacuau

SEQ ID NO: 1951 - RNA, 19 nt, Artificial Sequence
  Description of Artificial Sequence: Synthetic oligonucleotide
uggcuugguuguuacuaua

SEQ ID NO: 1952 - RNA, 19 nt, Artificial Sequence
  Description of Artificial Sequence: Synthetic oligonucleotide
ggcuugguuguuacuauaa

SEQ ID NO: 1953 - RNA, 19 nt, Artificial Sequence
  Description of Artificial Sequence: Synthetic oligonucleotide
gcuugguuguuacuauaag

SEQ ID NO: 1954 - RNA, 19 nt, Artificial Sequence
  Description of Artificial Sequence: Synthetic oligonucleotide
cuugguuguuacuauaaga

SEQ ID NO: 1955 - RNA, 19 nt, Artificial Sequence
  Description of Artificial Sequence: Synthetic oligonucleotide
uugguuguuacuauaagag

SEQ ID NO: 1956 - RNA, 19 nt, Artificial Sequence
  Description of Artificial Sequence: Synthetic oligonucleotide
ugguuguuacuauaagagu

SEQ ID NO: 1957 - RNA, 19 nt, Artificial Sequence
  Description of Artificial Sequence: Synthetic oligonucleotide
gguuguuacuauaagagua

SEQ ID NO: 1958 - RNA, 19 nt, Artificial Sequence
  Description of Artificial Sequence: Synthetic oligonucleotide
guuguuacuauaagaguaa

SEQ ID NO: 1959 - RNA, 19 nt, Artificial Sequence
  Description of Artificial Sequence: Synthetic oligonucleotide
uuguuacuauaagaguaau

SEQ ID NO: 1960 - RNA, 19 nt, Artificial Sequence
  Description of Artificial Sequence: Synthetic oligonucleotide
uguuacuauaagaguaauu

SEQ ID NO: 1961 - RNA, 19 nt, Artificial Sequence
  Description of Artificial Sequence: Synthetic oligonucleotide
guuacuauaagaguaauug

SEQ ID NO: 1962 - RNA, 19 nt, Artificial Sequence
  Description of Artificial Sequence: Synthetic oligonucleotide
uuacuauaagaguaauugc

SEQ ID NO: 1963 - RNA, 19 nt, Artificial Sequence
  Description of Artificial Sequence: Synthetic oligonucleotide
uacuauaagaguaauugcc

SEQ ID NO: 1964 - RNA, 19 nt, Artificial Sequence
  Description of Artificial Sequence: Synthetic oligonucleotide
acuauaagaguaauugccu

SEQ ID NO: 1965 - RNA, 19 nt, Artificial Sequence
  Description of Artificial Sequence: Synthetic oligonucleotide
cuauaagaguaauugccua

SEQ ID NO: 1966 - RNA, 19 nt, Artificial Sequence
  Description of Artificial Sequence: Synthetic oligonucleotide
uauaagaguaauugccuaa

SEQ ID NO: 1967 - RNA, 19 nt, Artificial Sequence
  Description of Artificial Sequence: Synthetic oligonucleotide
auaagaguaauugccuaac

SEQ ID NO: 1968 - RNA, 19 nt, Artificial Sequence
  Description of Artificial Sequence: Synthetic oligonucleotide
uaagaguaauugccuaacu

SEQ ID NO: 1969 - RNA, 19 nt, Artificial Sequence
  Description of Artificial Sequence: Synthetic oligonucleotide
aagaguaauugccuaacuu

SEQ ID NO: 1970 - RNA, 19 nt, Artificial Sequence
  Description of Artificial Sequence: Synthetic oligonucleotide
agaguaauugccuaacuug

SEQ ID NO: 1971 - RNA, 19 nt, Artificial Sequence
  Description of Artificial Sequence: Synthetic oligonucleotide
gaguaauugccuaacuuga

SEQ ID NO: 1972 - RNA, 19 nt, Artificial Sequence
  Description of Artificial Sequence: Synthetic oligonucleotide
aguaauugccuaacuugau

SEQ ID NO: 1973 - RNA, 19 nt, Artificial Sequence
  Description of Artificial Sequence: Synthetic oligonucleotide
guaauugccuaacuugauu

SEQ ID NO: 1974 - RNA, 19 nt, Artificial Sequence
  Description of Artificial Sequence: Synthetic oligonucleotide
uaauugccuaacuugauuu

SEQ ID NO: 1975 - RNA, 19 nt, Artificial Sequence
  Description of Artificial Sequence: Synthetic oligonucleotide
aauugccuaacuugauuuu

SEQ ID NO: 1976 - RNA, 19 nt, Artificial Sequence
  Description of Artificial Sequence: Synthetic oligonucleotide
auugccuaacuugauuuuu

SEQ ID NO: 1977 - RNA, 19 nt, Artificial Sequence
  Description of Artificial Sequence: Synthetic oligonucleotide
uugccuaacuugauuuuuc

SEQ ID NO: 1978 - RNA, 19 nt, Artificial Sequence
  Description of Artificial Sequence: Synthetic oligonucleotide
ugccuaacuugauuuuuca

SEQ ID NO: 1979 - RNA, 19 nt, Artificial Sequence
  Description of Artificial Sequence: Synthetic oligonucleotide
gccuaacuugauuuuucau

SEQ ID NO: 1980 - RNA, 19 nt, Artificial Sequence
  Description of Artificial Sequence: Synthetic oligonucleotide
ccuaacuugauuuuucauc

SEQ ID NO: 1981 - RNA, 19 nt, Artificial Sequence
  Description of Artificial Sequence: Synthetic oligonucleotide
cuaacuugauuuuucaucu

SEQ ID NO: 1982 - RNA, 19 nt, Artificial Sequence
  Description of Artificial Sequence: Synthetic oligonucleotide
uaacuugauuuuucaucuc

SEQ ID NO: 1983 - RNA, 19 nt, Artificial Sequence
  Description of Artificial Sequence: Synthetic oligonucleotide
aacuugauuuuucaucucu

SEQ ID NO: 1984 - RNA, 19 nt, Artificial Sequence
  Description of Artificial Sequence: Synthetic oligonucleotide
acuugauuuuucaucucuu

SEQ ID NO: 1985 - RNA, 19 nt, Artificial Sequence
  Description of Artificial Sequence: Synthetic oligonucleotide
cuugauuuuucaucucuuu

SEQ ID NO: 1986 - RNA, 19 nt, Artificial Sequence
  Description of Artificial Sequence: Synthetic oligonucleotide
uugauuuuucaucucuuua

SEQ ID NO: 1987 - RNA, 19 nt, Artificial Sequence
  Description of Artificial Sequence: Synthetic oligonucleotide
ugauuuuucaucucuuuaa

SEQ ID NO: 1988 - RNA, 19 nt, Artificial Sequence
  Description of Artificial Sequence: Synthetic oligonucleotide
gauuuuucaucucuuuaac

SEQ ID NO: 1989 - RNA, 19 nt, Artificial Sequence
  Description of Artificial Sequence: Synthetic oligonucleotide
auuuuucaucucuuuaacc

SEQ ID NO: 1990 - RNA, 19 nt, Artificial Sequence
  Description of Artificial Sequence: Synthetic oligonucleotide
uuuuucaucucuuuaacca

SEQ ID NO: 1991 - RNA, 19 nt, Artificial Sequence
  Description of Artificial Sequence: Synthetic oligonucleotide
uuuucaucucuuuaaccaa

SEQ ID NO: 1992 - RNA, 19 nt, Artificial Sequence
  Description of Artificial Sequence: Synthetic oligonucleotide
uuucaucucuuuaaccaaa

SEQ ID NO: 1993 - RNA, 19 nt, Artificial Sequence
  Description of Artificial Sequence: Synthetic oligonucleotide
uucaucucuuuaaccaaac

SEQ ID NO: 1994 - RNA, 19 nt, Artificial Sequence
  Description of Artificial Sequence: Synthetic oligonucleotide
ucaucucuuuaaccaaacu

SEQ ID NO: 1995 - RNA, 19 nt, Artificial Sequence
  Description of Artificial Sequence: Synthetic oligonucleotide
caucucuuuaaccaaacuu

SEQ ID NO: 1996 - RNA, 19 nt, Artificial Sequence
  Description of Artificial Sequence: Synthetic oligonucleotide
aucucuuuaaccaaacuug

SEQ ID NO: 1997 - RNA, 19 nt, Artificial Sequence
  Description of Artificial Sequence: Synthetic oligonucleotide
ucucuuuaaccaaacuugu

SEQ ID NO: 1998 - RNA, 19 nt, Artificial Sequence
  Description of Artificial Sequence: Synthetic oligonucleotide
cucuuuaaccaaacuugug

SEQ ID NO: 1999 - RNA, 19 nt, Artificial Sequence
  Description of Artificial Sequence: Synthetic oligonucleotide
ucuuuaaccaaacuugugg

SEQ ID NO: 2000 - RNA, 19 nt, Artificial Sequence
  Description of Artificial Sequence: Synthetic oligonucleotide
cuuuaaccaaacuuguggc

SEQ ID NO: 2001 - RNA, 19 nt, Artificial Sequence
  Description of Artificial Sequence: Synthetic oligonucleotide
uuuaaccaaacuuguggcc

SEQ ID NO: 2002 - RNA, 19 nt, Artificial Sequence
  Description of Artificial Sequence: Synthetic oligonucleotide
uuaaccaaacuuguggcca

SEQ ID NO: 2003 - RNA, 19 nt, Artificial Sequence
  Description of Artificial Sequence: Synthetic oligonucleotide
uaaccaaacuuguggccaa

SEQ ID NO: 2004 - RNA, 19 nt, Artificial Sequence
  Description of Artificial Sequence: Synthetic oligonucleotide
aaccaaacuuguggccaaa

SEQ ID NO: 2005 - RNA, 19 nt, Artificial Sequence
  Description of Artificial Sequence: Synthetic oligonucleotide
accaaacuuguggccaaaa

SEQ ID NO: 2006 - RNA, 19 nt, Artificial Sequence
  Description of Artificial Sequence: Synthetic oligonucleotide
ccaaacuuguggccaaaag

SEQ ID NO: 2007 - RNA, 19 nt, Artificial Sequence
  Description of Artificial Sequence: Synthetic oligonucleotide
caaacuuguggccaaaaga

SEQ ID NO: 2008 - RNA, 19 nt, Artificial Sequence
  Description of Artificial Sequence: Synthetic oligonucleotide
aaacuuguggccaaaagau

SEQ ID NO: 2009 - RNA, 19 nt, Artificial Sequence
  Description of Artificial Sequence: Synthetic oligonucleotide
aacuuguggccaaaagaua

SEQ ID NO: 2010 - RNA, 19 nt, Artificial Sequence
  Description of Artificial Sequence: Synthetic oligonucleotide
acuuguggccaaaagauau

SEQ ID NO: 2011 - RNA, 19 nt, Artificial Sequence
  Description of Artificial Sequence: Synthetic oligonucleotide
cuuguggccaaaagauauu

SEQ ID NO: 2012 - RNA, 19 nt, Artificial Sequence
  Description of Artificial Sequence: Synthetic oligonucleotide
uuguggccaaaagauauuu

SEQ ID NO: 2013 - RNA, 19 nt, Artificial Sequence
  Description of Artificial Sequence: Synthetic oligonucleotide
uguggccaaaagauauuug

SEQ ID NO: 2014 - RNA, 19 nt, Artificial Sequence
  Description of Artificial Sequence: Synthetic oligonucleotide
guggccaaaagauauuuga

SEQ ID NO: 2015 - RNA, 19 nt, Artificial Sequence
  Description of Artificial Sequence: Synthetic oligonucleotide
uggccaaaagauauuugac

SEQ ID NO: 2016 - RNA, 19 nt, Artificial Sequence
  Description of Artificial Sequence: Synthetic oligonucleotide
ggccaaaagauauuugacc

SEQ ID NO: 2017 - RNA, 19 nt, Artificial Sequence
  Description of Artificial Sequence: Synthetic oligonucleotide
gccaaaagauauuugaccg

SEQ ID NO: 2018 - RNA, 19 nt, Artificial Sequence
  Description of Artificial Sequence: Synthetic oligonucleotide
ccaaaagauauuugaccgu

SEQ ID NO: 2019 - RNA, 19 nt, Artificial Sequence
  Description of Artificial Sequence: Synthetic oligonucleotide
caaaagauauuugaccguu

SEQ ID NO: 2020 - RNA, 19 nt, Artificial Sequence
  Description of Artificial Sequence: Synthetic oligonucleotide
aaaagauauuugaccguuu

SEQ ID NO: 2021 - RNA, 19 nt, Artificial Sequence
  Description of Artificial Sequence: Synthetic oligonucleotide
aaagauauuugaccguuuc

SEQ ID NO: 2022 - RNA, 19 nt, Artificial Sequence
  Description of Artificial Sequence: Synthetic oligonucleotide
aagauauuugaccguuucc

SEQ ID NO: 2023 - RNA, 19 nt, Artificial Sequence
  Description of Artificial Sequence: Synthetic oligonucleotide
agauauuugaccguuucca

SEQ ID NO: 2024 - RNA, 19 nt, Artificial Sequence
  Description of Artificial Sequence: Synthetic oligonucleotide
gauauuugaccguuuccaa

SEQ ID NO: 2025 - RNA, 19 nt, Artificial Sequence
  Description of Artificial Sequence: Synthetic oligonucleotide
auauuugaccguuuccaaa

SEQ ID NO: 2026 - RNA, 19 nt, Artificial Sequence
  Description of Artificial Sequence: Synthetic oligonucleotide
uauuugaccguuuccaaaa

SEQ ID NO: 2027 - RNA, 19 nt, Artificial Sequence
  Description of Artificial Sequence: Synthetic oligonucleotide
auuugaccguuuccaaaau

SEQ ID NO: 2028 - RNA, 19 nt, Artificial Sequence
  Description of Artificial Sequence: Synthetic oligonucleotide
uuugaccguuuccaaaauu

SEQ ID NO: 2029 - RNA, 19 nt, Artificial Sequence
  Description of Artificial Sequence: Synthetic oligonucleotide
uugaccguuuccaaaauuc

SEQ ID NO: 2030 - RNA, 19 nt, Artificial Sequence
  Description of Artificial Sequence: Synthetic oligonucleotide
ugaccguuuccaaaauuca

SEQ ID NO: 2031 - RNA, 19 nt, Artificial Sequence
  Description of Artificial Sequence: Synthetic oligonucleotide
gaccguuuccaaaauucag

SEQ ID NO: 2032 - RNA, 19 nt, Artificial Sequence
  Description of Artificial Sequence: Synthetic oligonucleotide
accguuuccaaaauucaga

SEQ ID NO: 2033 - RNA, 19 nt, Artificial Sequence
  Description of Artificial Sequence: Synthetic oligonucleotide
ccguuuccaaaauucagau

SEQ ID NO: 2034 - RNA, 19 nt, Artificial Sequence
  Description of Artificial Sequence: Synthetic oligonucleotide
cguuuccaaaauucagauu

SEQ ID NO: 2035 - RNA, 19 nt, Artificial Sequence
  Description of Artificial Sequence: Synthetic oligonucleotide
guuuccaaaauucagauuc

SEQ ID NO: 2036 - RNA, 19 nt, Artificial Sequence
  Description of Artificial Sequence: Synthetic oligonucleotide
uuuccaaaauucagauucu

SEQ ID NO: 2037 - RNA, 19 nt, Artificial Sequence
  Description of Artificial Sequence: Synthetic oligonucleotide
uuccaaaauucagauucug

SEQ ID NO: 2038 - RNA, 19 nt, Artificial Sequence
  Description of Artificial Sequence: Synthetic oligonucleotide
uccaaaauucagauucugc

SEQ ID NO: 2039 - RNA, 19 nt, Artificial Sequence
  Description of Artificial Sequence: Synthetic oligonucleotide
ccaaaauucagauucugcc

SEQ ID NO: 2040 - RNA, 19 nt, Artificial Sequence
  Description of Artificial Sequence: Synthetic oligonucleotide
caaaauucagauucugccu

SEQ ID NO: 2041 - RNA, 19 nt, Artificial Sequence
  Description of Artificial Sequence: Synthetic oligonucleotide
aaaauucagauucugccuc

SEQ ID NO: 2042 - RNA, 19 nt, Artificial Sequence
  Description of Artificial Sequence: Synthetic oligonucleotide
aaauucagauucugccucu

SEQ ID NO: 2043 - RNA, 19 nt, Artificial Sequence
  Description of Artificial Sequence: Synthetic oligonucleotide
aauucagauucugccucug

SEQ ID NO: 2044 - RNA, 19 nt, Artificial Sequence
  Description of Artificial Sequence: Synthetic oligonucleotide
auucagauucugccucugc

SEQ ID NO: 2045 - RNA, 19 nt, Artificial Sequence
  Description of Artificial Sequence: Synthetic oligonucleotide
uucagauucugccucugcg

SEQ ID NO: 2046 - RNA, 19 nt, Artificial Sequence
  Description of Artificial Sequence: Synthetic oligonucleotide
ucagauucugccucugcgg

SEQ ID NO: 2047 - RNA, 19 nt, Artificial Sequence
  Description of Artificial Sequence: Synthetic oligonucleotide
cagauucugccucugcgga

SEQ ID NO: 2048 - RNA, 19 nt, Artificial Sequence
  Description of Artificial Sequence: Synthetic oligonucleotide
agauucugccucugcggau

SEQ ID NO: 2049 - RNA, 19 nt, Artificial Sequence
  Description of Artificial Sequence: Synthetic oligonucleotide
gauucugccucugcggaua

SEQ ID NO: 2050 - RNA, 19 nt, Artificial Sequence
  Description of Artificial Sequence: Synthetic oligonucleotide
auucugccucugcggauaa

SEQ ID NO: 2051 - RNA, 19 nt, Artificial Sequence
  Description of Artificial Sequence: Synthetic oligonucleotide
uucugccucugcggauaaa

SEQ ID NO: 2052 - RNA, 19 nt, Artificial Sequence
  Description of Artificial Sequence: Synthetic oligonucleotide
ucugccucugcggauaaau

SEQ ID NO: 2053 - RNA, 19 nt, Artificial Sequence
  Description of Artificial Sequence: Synthetic oligonucleotide
cugccucugcggauaaaua

SEQ ID NO: 2054 - RNA, 19 nt, Artificial Sequence
  Description of Artificial Sequence: Synthetic oligonucleotide
ugccucugcggauaaauau

SEQ ID NO: 2055 - RNA, 19 nt, Artificial Sequence
  Description of Artificial Sequence: Synthetic oligonucleotide
gccucugcggauaaauauu

SEQ ID NO: 2056 - RNA, 19 nt, Artificial Sequence
  Description of Artificial Sequence: Synthetic oligonucleotide
ccucugcggauaaauauuu

SEQ ID NO: 2057 - RNA, 19 nt, Artificial Sequence
  Description of Artificial Sequence: Synthetic oligonucleotide
cucugcggauaaauauuug

SEQ ID NO: 2058 - RNA, 19 nt, Artificial Sequence
  Description of Artificial Sequence: Synthetic oligonucleotide
ucugcggauaaauauuugc

SEQ ID NO: 2059 - RNA, 19 nt, Artificial Sequence
  Description of Artificial Sequence: Synthetic oligonucleotide
cugcggauaaauauuugcc

SEQ ID NO: 2060 - RNA, 19 nt, Artificial Sequence
  Description of Artificial Sequence: Synthetic oligonucleotide
ugcggauaaauauuugcca

SEQ ID NO: 2061 - RNA, 19 nt, Artificial Sequence
  Description of Artificial Sequence: Synthetic oligonucleotide
gcggauaaauauuugccac

SEQ ID NO: 2062 - RNA, 19 nt, Artificial Sequence
  Description of Artificial Sequence: Synthetic oligonucleotide
cggauaaauauuugccacg

SEQ ID NO: 2063 - RNA, 19 nt, Artificial Sequence
  Description of Artificial Sequence: Synthetic oligonucleotide
ggauaaauauuugccacga

SEQ ID NO: 2064 - RNA, 19 nt, Artificial Sequence
  Description of Artificial Sequence: Synthetic oligonucleotide
gauaaauauuugccacgaa

SEQ ID NO: 2065 - RNA, 19 nt, Artificial Sequence
  Description of Artificial Sequence: Synthetic oligonucleotide
auaaauauuugccacgaau

SEQ ID NO: 2066 - RNA, 19 nt, Artificial Sequence
  Description of Artificial Sequence: Synthetic oligonucleotide
uaaauauuugccacgaaug

SEQ ID NO: 2067 - RNA, 19 nt, Artificial Sequence
  Description of Artificial Sequence: Synthetic oligonucleotide
aaauauuugccacgaauga

SEQ ID NO: 2068 - RNA, 19 nt, Artificial Sequence
  Description of Artificial Sequence: Synthetic oligonucleotide
aauauuugccacgaaugag

SEQ ID NO: 2069 - RNA, 19 nt, Artificial Sequence
  Description of Artificial Sequence: Synthetic oligonucleotide
auauuugccacgaaugagu

SEQ ID NO: 2070 - RNA, 19 nt, Artificial Sequence
  Description of Artificial Sequence: Synthetic oligonucleotide
uauuugccacgaaugagua

SEQ ID NO: 2071 - RNA, 19 nt, Artificial Sequence
  Description of Artificial Sequence: Synthetic oligonucleotide
auuugccacgaaugaguaa

SEQ ID NO: 2072 - RNA, 19 nt, Artificial Sequence
  Description of Artificial Sequence: Synthetic oligonucleotide
uuugccacgaaugaguaac

SEQ ID NO: 2073 - RNA, 19 nt, Artificial Sequence
  Description of Artificial Sequence: Synthetic oligonucleotide
uugccacgaaugaguaacu

SEQ ID NO: 2074 - RNA, 19 nt, Artificial Sequence
  Description of Artificial Sequence: Synthetic oligonucleotide
ugccacgaaugaguaacuc

SEQ ID NO: 2075 - RNA, 19 nt, Artificial Sequence
  Description of Artificial Sequence: Synthetic oligonucleotide
gccacgaaugaguaacucc

SEQ ID NO: 2076 - RNA, 19 nt, Artificial Sequence
  Description of Artificial Sequence: Synthetic oligonucleotide
ccacgaaugaguaacuccu

SEQ ID NO: 2077 - RNA, 19 nt, Artificial Sequence
  Description of Artificial Sequence: Synthetic oligonucleotide
cacgaaugaguaacuccug

SEQ ID NO: 2078 - RNA, 19 nt, Artificial Sequence
  Description of Artificial Sequence: Synthetic oligonucleotide
acgaaugaguaacuccugu

SEQ ID NO: 2079 - RNA, 19 nt, Artificial Sequence
  Description of Artificial Sequence: Synthetic oligonucleotide
cgaaugaguaacuccuguc

SEQ ID NO: 2080 - RNA, 19 nt, Artificial Sequence
  Description of Artificial Sequence: Synthetic oligonucleotide
gaaugaguaacuccuguca

SEQ ID NO: 2081 - RNA, 19 nt, Artificial Sequence
  Description of Artificial Sequence: Synthetic oligonucleotide
aaugaguaacuccugucac

SEQ ID NO: 2082 - RNA, 19 nt, Artificial Sequence
  Description of Artificial Sequence: Synthetic oligonucleotide
augaguaacuccugucacc

SEQ ID NO: 2083 - RNA, 19 nt, Artificial Sequence
  Description of Artificial Sequence: Synthetic oligonucleotide
ugaguaacuccugucacca

SEQ ID NO: 2084 - RNA, 19 nt, Artificial Sequence
  Description of Artificial Sequence: Synthetic oligonucleotide
gaguaacuccugucaccac

SEQ ID NO: 2085 - RNA, 19 nt, Artificial Sequence
  Description of Artificial Sequence: Synthetic oligonucleotide
aguaacuccugucaccacu

SEQ ID NO: 2086 - RNA, 19 nt, Artificial Sequence
  Description of Artificial Sequence: Synthetic oligonucleotide
guaacuccugucaccacuc

SEQ ID NO: 2087 - RNA, 19 nt, Artificial Sequence
  Description of Artificial Sequence: Synthetic oligonucleotide
uaacuccugucaccacucu

SEQ ID NO: 2088 - RNA, 19 nt, Artificial Sequence
  Description of Artificial Sequence: Synthetic oligonucleotide
aacuccugucaccacucug

SEQ ID NO: 2089 - RNA, 19 nt, Artificial Sequence
  Description of Artificial Sequence: Synthetic oligonucleotide
acuccugucaccacucuga

SEQ ID NO: 2090 - RNA, 19 nt, Artificial Sequence
  Description of Artificial Sequence: Synthetic oligonucleotide
cuccugucaccacucugaa

SEQ ID NO: 2091 - RNA, 19 nt, Artificial Sequence
  Description of Artificial Sequence: Synthetic oligonucleotide
uccugucaccacucugaag

SEQ ID NO: 2092 - RNA, 19 nt, Artificial Sequence
  Description of Artificial Sequence: Synthetic oligonucleotide
ccugucaccacucugaagg

SEQ ID NO: 2093 - RNA, 19 nt, Artificial Sequence
  Description of Artificial Sequence: Synthetic oligonucleotide
cugucaccacucugaaggu

SEQ ID NO: 2094 - RNA, 19 nt, Artificial Sequence
  Description of Artificial Sequence: Synthetic oligonucleotide
ugucaccacucugaagguc

SEQ ID NO: 2095 - RNA, 19 nt, Artificial Sequence
  Description of Artificial Sequence: Synthetic oligonucleotide
gucaccacucugaaggucc

SEQ ID NO: 2096 - RNA, 19 nt, Artificial Sequence
  Description of Artificial Sequence: Synthetic oligonucleotide
ucaccacucugaaggucca

SEQ ID NO: 2097 - RNA, 19 nt, Artificial Sequence
  Description of Artificial Sequence: Synthetic oligonucleotide
caccacucugaagguccag

SEQ ID NO: 2098 - RNA, 19 nt, Artificial Sequence
  Description of Artificial Sequence: Synthetic oligonucleotide
accacucugaagguccaga

SEQ ID NO: 2099 - RNA, 19 nt, Artificial Sequence
  Description of Artificial Sequence: Synthetic oligonucleotide
ccacucugaagguccagac

SEQ ID NO: 2100 - RNA, 19 nt, Artificial Sequence
  Description of Artificial Sequence: Synthetic oligonucleotide
cacucugaagguccagaca

SEQ ID NO: 2101 - RNA, 19 nt, Artificial Sequence
  Description of Artificial Sequence: Synthetic oligonucleotide
acucugaagguccagacag

SEQ ID NO: 2102 - RNA, 19 nt, Artificial Sequence
  Description of Artificial Sequence: Synthetic oligonucleotide
cucugaagguccagacaga

SEQ ID NO: 2103 - RNA, 19 nt, Artificial Sequence
  Description of Artificial Sequence: Synthetic oligonucleotide
ucugaagguccagacagaa

SEQ ID NO: 2104 - RNA, 19 nt, Artificial Sequence
  Description of Artificial Sequence: Synthetic oligonucleotide
cugaagguccagacagaag

SEQ ID NO: 2105 - RNA, 19 nt, Artificial Sequence
  Description of Artificial Sequence: Synthetic oligonucleotide
ugaagguccagacagaagg

SEQ ID NO: 2106 - RNA, 19 nt, Artificial Sequence
  Description of Artificial Sequence: Synthetic oligonucleotide
gaagguccagacagaaggu

SEQ ID NO: 2107 - RNA, 19 nt, Artificial Sequence
  Description of Artificial Sequence: Synthetic oligonucleotide
aagguccagacagaagguu

SEQ ID NO: 2108 - RNA, 19 nt, Artificial Sequence
  Description of Artificial Sequence: Synthetic oligonucleotide
agguccagacagaagguuu

SEQ ID NO: 2109 - RNA, 19 nt, Artificial Sequence
  Description of Artificial Sequence: Synthetic oligonucleotide
gguccagacagaagguuuu

SEQ ID NO: 2110 - RNA, 19 nt, Artificial Sequence
  Description of Artificial Sequence: Synthetic oligonucleotide
guccagacagaagguuuug

SEQ ID NO: 2111 - RNA, 19 nt, Artificial Sequence
  Description of Artificial Sequence: Synthetic oligonucleotide
uccagacagaagguuuuga

SEQ ID NO: 2112 - RNA, 19 nt, Artificial Sequence
  Description of Artificial Sequence: Synthetic oligonucleotide
ccagacagaagguuuugac

SEQ ID NO: 2113 - RNA, 19 nt, Artificial Sequence
  Description of Artificial Sequence: Synthetic oligonucleotide
cagacagaagguuuugaca

SEQ ID NO: 2114 - RNA, 19 nt, Artificial Sequence
  Description of Artificial Sequence: Synthetic oligonucleotide
agacagaagguuuugacac

SEQ ID NO: 2115 - RNA, 19 nt, Artificial Sequence
  Description of Artificial Sequence: Synthetic oligonucleotide
gacagaagguuuugacaca

SEQ ID NO: 2116 - RNA, 19 nt, Artificial Sequence
  Description of Artificial Sequence: Synthetic oligonucleotide
acagaagguuuugacacau

SEQ ID NO: 2117 - RNA, 19 nt, Artificial Sequence
  Description of Artificial Sequence: Synthetic oligonucleotide
cagaagguuuugacacauu

SEQ ID NO: 2118 - RNA, 19 nt, Artificial Sequence
  Description of Artificial Sequence: Synthetic oligonucleotide
agaagguuuugacacauuc

SEQ ID NO: 2119 - RNA, 19 nt, Artificial Sequence
  Description of Artificial Sequence: Synthetic oligonucleotide
gaagguuuugacacauucu

SEQ ID NO: 2120 - RNA, 19 nt, Artificial Sequence
  Description of Artificial Sequence: Synthetic oligonucleotide
aagguuuugacacauucuu

SEQ ID NO: 2121 - RNA, 19 nt, Artificial Sequence
  Description of Artificial Sequence: Synthetic oligonucleotide
agguuuugacacauucuua

SEQ ID NO: 2122 - RNA, 19 nt, Artificial Sequence
  Description of Artificial Sequence: Synthetic oligonucleotide
gguuuugacacauucuuag

SEQ ID NO: 2123 - RNA, 19 nt, Artificial Sequence
  Description of Artificial Sequence: Synthetic oligonucleotide
guuuugacacauucuuagc

SEQ ID NO: 2124 - RNA, 19 nt, Artificial Sequence
  Description of Artificial Sequence: Synthetic oligonucleotide
uuuugacacauucuuagca

SEQ ID NO: 2125 - RNA, 19 nt, Artificial Sequence
  Description of Artificial Sequence: Synthetic oligonucleotide
uuugacacauucuuagcac

SEQ ID NO: 2126 - RNA, 19 nt, Artificial Sequence
  Description of Artificial Sequence: Synthetic oligonucleotide
uugacacauucuuagcacu

SEQ ID NO: 2127 - RNA, 19 nt, Artificial Sequence
  Description of Artificial Sequence: Synthetic oligonucleotide
ugacacauucuuagcacug

SEQ ID NO: 2128 - RNA, 19 nt, Artificial Sequence
  Description of Artificial Sequence: Synthetic oligonucleotide
gacacauucuuagcacuga

SEQ ID NO: 2129 - RNA, 19 nt, Artificial Sequence
  Description of Artificial Sequence: Synthetic oligonucleotide
acacauucuuagcacugaa

SEQ ID NO: 2130 - RNA, 19 nt, Artificial Sequence
  Description of Artificial Sequence: Synthetic oligonucleotide
cacauucuuagcacugaac

SEQ ID NO: 2131 - RNA, 19 nt, Artificial Sequence
  Description of Artificial Sequence: Synthetic oligonucleotide
acauucuuagcacugaacu

SEQ ID NO: 2132 - RNA, 19 nt, Artificial Sequence
  Description of Artificial Sequence: Synthetic oligonucleotide
cauucuuagcacugaacuc

SEQ ID NO: 2133 - RNA, 19 nt, Artificial Sequence
  Description of Artificial Sequence: Synthetic oligonucleotide
auucuuagcacugaacucc

SEQ ID NO: 2134 - RNA, 19 nt, Artificial Sequence
  Description of Artificial Sequence: Synthetic oligonucleotide
uucuuagcacugaacuccu

SEQ ID NO: 2135 - RNA, 19 nt, Artificial Sequence
  Description of Artificial Sequence: Synthetic oligonucleotide
ucuuagcacugaacuccuc

SEQ ID NO: 2136 - RNA, 19 nt, Artificial Sequence
  Description of Artificial Sequence: Synthetic oligonucleotide
cuuagcacugaacuccucu

SEQ ID NO: 2137 - RNA, 19 nt, Artificial Sequence
  Description of Artificial Sequence: Synthetic oligonucleotide
uuagcacugaacuccucug

SEQ ID NO: 2138 - RNA, 19 nt, Artificial Sequence
  Description of Artificial Sequence: Synthetic oligonucleotide
uagcacugaacuccucugu

SEQ ID NO: 2139 - RNA, 19 nt, Artificial Sequence
  Description of Artificial Sequence: Synthetic oligonucleotide
agcacugaacuccucugug

SEQ ID NO: 2140 - RNA, 19 nt, Artificial Sequence
  Description of Artificial Sequence: Synthetic oligonucleotide
gcacugaacuccucuguga

SEQ ID NO: 2141 - RNA, 19 nt, Artificial Sequence
  Description of Artificial Sequence: Synthetic oligonucleotide
cacugaacuccucugugau

SEQ ID NO: 2142 - RNA, 19 nt, Artificial Sequence
  Description of Artificial Sequence: Synthetic oligonucleotide
acugaacuccucugugauc

SEQ ID NO: 2143 - RNA, 19 nt, Artificial Sequence
  Description of Artificial Sequence: Synthetic oligonucleotide
cugaacuccucugugaucu

SEQ ID NO: 2144 - RNA, 19 nt, Artificial Sequence
  Description of Artificial Sequence: Synthetic oligonucleotide
ugaacuccucugugaucua

SEQ ID NO: 2145 - RNA, 19 nt, Artificial Sequence
  Description of Artificial Sequence: Synthetic oligonucleotide
gaacuccucugugaucuag

SEQ ID NO: 2146 - RNA, 19 nt, Artificial Sequence
  Description of Artificial Sequence: Synthetic oligonucleotide
aacuccucugugaucuagg

SEQ ID NO: 2147 - RNA, 19 nt, Artificial Sequence
  Description of Artificial Sequence: Synthetic oligonucleotide
acuccucugugaucuagga

SEQ ID NO: 2148 - RNA, 19 nt, Artificial Sequence
  Description of Artificial Sequence: Synthetic oligonucleotide
cuccucugugaucuaggau

SEQ ID NO: 2149 - RNA, 19 nt, Artificial Sequence
  Description of Artificial Sequence: Synthetic oligonucleotide
uccucugugaucuaggaug

SEQ ID NO: 2150 - RNA, 19 nt, Artificial Sequence
  Description of Artificial Sequence: Synthetic oligonucleotide
ccucugugaucuaggauga

SEQ ID NO: 2151 - RNA, 19 nt, Artificial Sequence
  Description of Artificial Sequence: Synthetic oligonucleotide
cucugugaucuaggaugau

SEQ ID NO: 2152 - RNA, 19 nt, Artificial Sequence
  Description of Artificial Sequence: Synthetic oligonucleotide
ucugugaucuaggaugauc

SEQ ID NO: 2153 - RNA, 19 nt, Artificial Sequence
  Description of Artificial Sequence: Synthetic oligonucleotide
cugugaucuaggaugaucu

SEQ ID NO: 2154 - RNA, 19 nt, Artificial Sequence
  Description of Artificial Sequence: Synthetic oligonucleotide
ugugaucuaggaugaucug

SEQ ID NO: 2155 - RNA, 19 nt, Artificial Sequence
  Description of Artificial Sequence: Synthetic oligonucleotide
gugaucuaggaugaucugu

SEQ ID NO: 2156 - RNA, 19 nt, Artificial Sequence
  Description of Artificial Sequence: Synthetic oligonucleotide
ugaucuaggaugaucuguu

SEQ ID NO: 2157 - RNA, 19 nt, Artificial Sequence
  Description of Artificial Sequence: Synthetic oligonucleotide
gaucuaggaugaucuguuc

SEQ ID NO: 2158 - RNA, 19 nt, Artificial Sequence
  Description of Artificial Sequence: Synthetic oligonucleotide
aucuaggaugaucuguucc

SEQ ID NO: 2159 - RNA, 19 nt, Artificial Sequence
  Description of Artificial Sequence: Synthetic oligonucleotide
ucuaggaugaucuguuccc

SEQ ID NO: 2160 - RNA, 19 nt, Artificial Sequence
  Description of Artificial Sequence: Synthetic oligonucleotide
cuaggaugaucuguucccc

SEQ ID NO: 2161 - RNA, 19 nt, Artificial Sequence
  Description of Artificial Sequence: Synthetic oligonucleotide
uaggaugaucuguuccccc

SEQ ID NO: 2162 - RNA, 19 nt, Artificial Sequence
  Description of Artificial Sequence: Synthetic oligonucleotide
aggaugaucuguucccccu

SEQ ID NO: 2163 - RNA, 19 nt, Artificial Sequence
  Description of Artificial Sequence: Synthetic oligonucleotide
ggaugaucuguucccccuc

SEQ ID NO: 2164 - RNA, 19 nt, Artificial Sequence
  Description of Artificial Sequence: Synthetic oligonucleotide
gaugaucuguucccccucu

SEQ ID NO: 2165 - RNA, 19 nt, Artificial Sequence
  Description of Artificial Sequence: Synthetic oligonucleotide
augaucuguucccccucug

SEQ ID NO: 2166 - RNA, 19 nt, Artificial Sequence
  Description of Artificial Sequence: Synthetic oligonucleotide
ugaucuguucccccucuga

SEQ ID NO: 2167 - RNA, 19 nt, Artificial Sequence
  Description of Artificial Sequence: Synthetic oligonucleotide
gaucuguucccccucugau

SEQ ID NO: 2168 - RNA, 19 nt, Artificial Sequence
  Description of Artificial Sequence: Synthetic oligonucleotide
aucuguucccccucugaug

SEQ ID NO: 2169 - RNA, 19 nt, Artificial Sequence
  Description of Artificial Sequence: Synthetic oligonucleotide
ucuguucccccucugauga

SEQ ID NO: 2170 - RNA, 19 nt, Artificial Sequence
  Description of Artificial Sequence: Synthetic oligonucleotide
cuguucccccucugaugaa

SEQ ID NO: 2171 - RNA, 19 nt, Artificial Sequence
  Description of Artificial Sequence: Synthetic oligonucleotide
uguucccccucugaugaac

SEQ ID NO: 2172 - RNA, 19 nt, Artificial Sequence
  Description of Artificial Sequence: Synthetic oligonucleotide
guucccccucugaugaaca

SEQ ID NO: 2173 - RNA, 19 nt, Artificial Sequence
  Description of Artificial Sequence: Synthetic oligonucleotide
uucccccucugaugaacau

SEQ ID NO: 2174 - RNA, 19 nt, Artificial Sequence
  Description of Artificial Sequence: Synthetic oligonucleotide
ucccccucugaugaacauc

SEQ ID NO: 2175 - RNA, 19 nt, Artificial Sequence
  Description of Artificial Sequence: Synthetic oligonucleotide
cccccucugaugaacaucc

SEQ ID NO: 2176 - RNA, 19 nt, Artificial Sequence
  Description of Artificial Sequence: Synthetic oligonucleotide
ccccucugaugaacauccu

SEQ ID NO: 2177 - RNA, 19 nt, Artificial Sequence
  Description of Artificial Sequence: Synthetic oligonucleotide
cccucugaugaacauccuc

SEQ ID NO: 2178 - RNA, 19 nt, Artificial Sequence
  Description of Artificial Sequence: Synthetic oligonucleotide
ccucugaugaacauccucu

SEQ ID NO: 2179 - RNA, 19 nt, Artificial Sequence
  Description of Artificial Sequence: Synthetic oligonucleotide
cucugaugaacauccucug

SEQ ID NO: 2180 - RNA, 19 nt, Artificial Sequence
  Description of Artificial Sequence: Synthetic oligonucleotide
ucugaugaacauccucuga

SEQ ID NO: 2181 - RNA, 19 nt, Artificial Sequence
  Description of Artificial Sequence: Synthetic oligonucleotide
cugaugaacauccucugau

SEQ ID NO: 2182 - RNA, 19 nt, Artificial Sequence
  Description of Artificial Sequence: Synthetic oligonucleotide
ugaugaacauccucugaug

SEQ ID NO: 2183 - RNA, 19 nt, Artificial Sequence
  Description of Artificial Sequence: Synthetic oligonucleotide
gaugaacauccucugauga

SEQ ID NO: 2184 - RNA, 19 nt, Artificial Sequence
  Description of Artificial Sequence: Synthetic oligonucleotide
augaacauccucugaugau

SEQ ID NO: 2185 - RNA, 19 nt, Artificial Sequence
  Description of Artificial Sequence: Synthetic oligonucleotide
ugaacauccucugaugauc

SEQ ID NO: 2186 - RNA, 19 nt, Artificial Sequence
  Description of Artificial Sequence: Synthetic oligonucleotide
gaacauccucugaugaucu

SEQ ID NO: 2187 - RNA, 19 nt, Artificial Sequence
  Description of Artificial Sequence: Synthetic oligonucleotide
aacauccucugaugaucua

SEQ ID NO: 2188 - RNA, 19 nt, Artificial Sequence
  Description of Artificial Sequence: Synthetic oligonucleotide
acauccucugaugaucuag

SEQ ID NO: 2189 - RNA, 19 nt, Artificial Sequence
  Description of Artificial Sequence: Synthetic oligonucleotide
cauccucugaugaucuagg

SEQ ID NO: 2190 - RNA, 19 nt, Artificial Sequence
  Description of Artificial Sequence: Synthetic oligonucleotide
auccucugaugaucuaggc

SEQ ID NO: 2191 - RNA, 19 nt, Artificial Sequence
  Description of Artificial Sequence: Synthetic oligonucleotide
uccucugaugaucuaggcu

SEQ ID NO: 2192 - RNA, 19 nt, Artificial Sequence
  Description of Artificial Sequence: Synthetic oligonucleotide
ccucugaugaucuaggcuc

SEQ ID NO: 2193 - RNA, 19 nt, Artificial Sequence
  Description of Artificial Sequence: Synthetic oligonucleotide
cucugaugaucuaggcucc

SEQ ID NO: 2194 - RNA, 19 nt, Artificial Sequence
  Description of Artificial Sequence: Synthetic oligonucleotide
ucugaugaucuaggcuccc

SEQ ID NO: 2195 - RNA, 19 nt, Artificial Sequence
  Description of Artificial Sequence: Synthetic oligonucleotide
cugaugaucuaggcuccca

SEQ ID NO: 2196 - RNA, 19 nt, Artificial Sequence
  Description of Artificial Sequence: Synthetic oligonucleotide
ugaugaucuaggcucccag

SEQ ID NO: 2197 - RNA, 19 nt, Artificial Sequence
  Description of Artificial Sequence: Synthetic oligonucleotide
gaugaucuaggcucccagc

SEQ ID NO: 2198 - RNA, 19 nt, Artificial Sequence
  Description of Artificial Sequence: Synthetic oligonucleotide
augaucuaggcucccagca

SEQ ID NO: 2199 - RNA, 19 nt, Artificial Sequence
  Description of Artificial Sequence: Synthetic oligonucleotide
ugaucuaggcucccagcag

SEQ ID NO: 2200 - RNA, 19 nt, Artificial Sequence
  Description of Artificial Sequence: Synthetic oligonucleotide
gaucuaggcucccagcagg

SEQ ID NO: 2201 - RNA, 19 nt, Artificial Sequence
  Description of Artificial Sequence: Synthetic oligonucleotide
aucuaggcucccagcaggc

SEQ ID NO: 2202 - RNA, 19 nt, Artificial Sequence
  Description of Artificial Sequence: Synthetic oligonucleotide
ucuaggcucccagcaggcu

SEQ ID NO: 2203 - RNA, 19 nt, Artificial Sequence
  Description of Artificial Sequence: Synthetic oligonucleotide
cuaggcucccagcaggcua

SEQ ID NO: 2204 - RNA, 19 nt, Artificial Sequence
  Description of Artificial Sequence: Synthetic oligonucleotide
uaggcucccagcaggcuac

SEQ ID NO: 2205 - RNA, 19 nt, Artificial Sequence
  Description of Artificial Sequence: Synthetic oligonucleotide
aggcucccagcaggcuacu

SEQ ID NO: 2206 - RNA, 19 nt, Artificial Sequence
  Description of Artificial Sequence: Synthetic oligonucleotide
ggcucccagcaggcuacuu

SEQ ID NO: 2207 - RNA, 19 nt, Artificial Sequence
  Description of Artificial Sequence: Synthetic oligonucleotide
gcucccagcaggcuacuuu

SEQ ID NO: 2208 - RNA, 19 nt, Artificial Sequence
  Description of Artificial Sequence: Synthetic oligonucleotide
cucccagcaggcuacuuug

SEQ ID NO: 2209 - RNA, 19 nt, Artificial Sequence
  Description of Artificial Sequence: Synthetic oligonucleotide
ucccagcaggcuacuuuga

SEQ ID NO: 2210 - RNA, 19 nt, Artificial Sequence
  Description of Artificial Sequence: Synthetic oligonucleotide
cccagcaggcuacuuugaa

SEQ ID NO: 2211 - RNA, 19 nt, Artificial Sequence
  Description of Artificial Sequence: Synthetic oligonucleotide
ccagcaggcuacuuugaag

SEQ ID NO: 2212 - RNA, 19 nt, Artificial Sequence
  Description of Artificial Sequence: Synthetic oligonucleotide
cagcaggcuacuuugaagg

SEQ ID NO: 2213 - RNA, 19 nt, Artificial Sequence
  Description of Artificial Sequence: Synthetic oligonucleotide
agcaggcuacuuugaaggg

SEQ ID NO: 2214 - RNA, 19 nt, Artificial Sequence
  Description of Artificial Sequence: Synthetic oligonucleotide
gcaggcuacuuugaaggga

SEQ ID NO: 2215 - RNA, 19 nt, Artificial Sequence
  Description of Artificial Sequence: Synthetic oligonucleotide
caggcuacuuugaagggaa

SEQ ID NO: 2216 - RNA, 19 nt, Artificial Sequence
  Description of Artificial Sequence: Synthetic oligonucleotide
aggcuacuuugaagggaac

SEQ ID NO: 2217 - RNA, 19 nt, Artificial Sequence
  Description of Artificial Sequence: Synthetic oligonucleotide
ggcuacuuugaagggaaca

SEQ ID NO: 2218 - RNA, 19 nt, Artificial Sequence
  Description of Artificial Sequence: Synthetic oligonucleotide
gcuacuuugaagggaacaa

SEQ ID NO: 2219 - RNA, 19 nt, Artificial Sequence
  Description of Artificial Sequence: Synthetic oligonucleotide
cuacuuugaagggaacaau

SEQ ID NO: 2220 - RNA, 19 nt, Artificial Sequence
  Description of Artificial Sequence: Synthetic oligonucleotide
uacuuugaagggaacaauc

SEQ ID NO: 2221 - RNA, 19 nt, Artificial Sequence
  Description of Artificial Sequence: Synthetic oligonucleotide
acuuugaagggaacaauca

SEQ ID NO: 2222 - RNA, 19 nt, Artificial Sequence
  Description of Artificial Sequence: Synthetic oligonucleotide
cuuugaagggaacaaucag

SEQ ID NO: 2223 - RNA, 19 nt, Artificial Sequence
  Description of Artificial Sequence: Synthetic oligonucleotide
uuugaagggaacaaucaga

SEQ ID NO: 2224 - RNA, 19 nt, Artificial Sequence
  Description of Artificial Sequence: Synthetic oligonucleotide
uugaagggaacaaucagau

SEQ ID NO: 2225 - RNA, 19 nt, Artificial Sequence
  Description of Artificial Sequence: Synthetic oligonucleotide
ugaagggaacaaucagaug

SEQ ID NO: 2226 - RNA, 19 nt, Artificial Sequence
  Description of Artificial Sequence: Synthetic oligonucleotide
gaagggaacaaucagaugc

SEQ ID NO: 2227 - RNA, 19 nt, Artificial Sequence
  Description of Artificial Sequence: Synthetic oligonucleotide
aagggaacaaucagaugca

SEQ ID NO: 2228 - RNA, 19 nt, Artificial Sequence
  Description of Artificial Sequence: Synthetic oligonucleotide
agggaacaaucagaugcaa

SEQ ID NO: 2229 - RNA, 19 nt, Artificial Sequence
  Description of Artificial Sequence: Synthetic oligonucleotide
gggaacaaucagaugcaaa

SEQ ID NO: 2230 - RNA, 19 nt, Artificial Sequence
  Description of Artificial Sequence: Synthetic oligonucleotide
ggaacaaucagaugcaaaa

SEQ ID NO: 2231 - RNA, 19 nt, Artificial Sequence
  Description of Artificial Sequence: Synthetic oligonucleotide
gaacaaucagaugcaaaag

SEQ ID NO: 2232 - RNA, 19 nt, Artificial Sequence
  Description of Artificial Sequence: Synthetic oligonucleotide
aacaaucagaugcaaaagc

SEQ ID NO: 2233 - RNA, 19 nt, Artificial Sequence
  Description of Artificial Sequence: Synthetic oligonucleotide
acaaucagaugcaaaagcu

SEQ ID NO: 2234 - RNA, 19 nt, Artificial Sequence
  Description of Artificial Sequence: Synthetic oligonucleotide
caaucagaugcaaaagcuc

SEQ ID NO: 2235 - RNA, 19 nt, Artificial Sequence
  Description of Artificial Sequence: Synthetic oligonucleotide
aaucagaugcaaaagcucu

SEQ ID NO: 2236 - RNA, 19 nt, Artificial Sequence
  Description of Artificial Sequence: Synthetic oligonucleotide
aucagaugcaaaagcucuu

SEQ ID NO: 2237 - RNA, 19 nt, Artificial Sequence
  Description of Artificial Sequence: Synthetic oligonucleotide
ucagaugcaaaagcucuug

SEQ ID NO: 2238 - RNA, 19 nt, Artificial Sequence
  Description of Artificial Sequence: Synthetic oligonucleotide
cagaugcaaaagcucuugg

SEQ ID NO: 2239 - RNA, 19 nt, Artificial Sequence
  Description of Artificial Sequence: Synthetic oligonucleotide
agaugcaaaagcucuuggg

SEQ ID NO: 2240 - RNA, 19 nt, Artificial Sequence
  Description of Artificial Sequence: Synthetic oligonucleotide
gaugcaaaagcucuugggu

SEQ ID NO: 2241 - RNA, 19 nt, Artificial Sequence
  Description of Artificial Sequence: Synthetic oligonucleotide
augcaaaagcucuugggug

SEQ ID NO: 2242 - RNA, 19 nt, Artificial Sequence
  Description of Artificial Sequence: Synthetic oligonucleotide
ugcaaaagcucuugggugu

SEQ ID NO: 2243 - RNA, 19 nt, Artificial Sequence
  Description of Artificial Sequence: Synthetic oligonucleotide
gcaaaagcucuuggguguu

SEQ ID NO: 2244 - RNA, 19 nt, Artificial Sequence
  Description of Artificial Sequence: Synthetic oligonucleotide
caaaagcucuuggguguuu

SEQ ID NO: 2245 - RNA, 19 nt, Artificial Sequence
  Description of Artificial Sequence: Synthetic oligonucleotide
aaaagcucuuggguguuua

SEQ ID NO: 2246 - RNA, 19 nt, Artificial Sequence
  Description of Artificial Sequence: Synthetic oligonucleotide
aaagcucuuggguguuuau

SEQ ID NO: 2247 - RNA, 19 nt, Artificial Sequence
  Description of Artificial Sequence: Synthetic oligonucleotide
aagcucuuggguguuuauu

SEQ ID NO: 2248 - RNA, 19 nt, Artificial Sequence
  Description of Artificial Sequence: Synthetic oligonucleotide
agcucuuggguguuuauuu

SEQ ID NO: 2249 - RNA, 19 nt, Artificial Sequence
  Description of Artificial Sequence: Synthetic oligonucleotide
gcucuuggguguuuauuua

SEQ ID NO: 2250 - RNA, 19 nt, Artificial Sequence
  Description of Artificial Sequence: Synthetic oligonucleotide
cucuuggguguuuauuuaa

SEQ ID NO: 2251 - RNA, 19 nt, Artificial Sequence
  Description of Artificial Sequence: Synthetic oligonucleotide
ucuuggguguuuauuuaaa

SEQ ID NO: 2252 - RNA, 19 nt, Artificial Sequence
  Description of Artificial Sequence: Synthetic oligonucleotide
cuuggguguuuauuuaaaa

SEQ ID NO: 2253 - RNA, 19 nt, Artificial Sequence
  Description of Artificial Sequence: Synthetic oligonucleotide
uuggguguuuauuuaaaau

SEQ ID NO: 2254 - RNA, 19 nt, Artificial Sequence
  Description of Artificial Sequence: Synthetic oligonucleotide
uggguguuuauuuaaaaua

SEQ ID NO: 2255 - RNA, 19 nt, Artificial Sequence
  Description of Artificial Sequence: Synthetic oligonucleotide
ggguguuuauuuaaaauac

SEQ ID NO: 2256 - RNA, 19 nt, Artificial Sequence
  Description of Artificial Sequence: Synthetic oligonucleotide
gguguuuauuuaaaauacu

SEQ ID NO: 2257 - RNA, 19 nt, Artificial Sequence
  Description of Artificial Sequence: Synthetic oligonucleotide
guguuuauuuaaaauacua

SEQ ID NO: 2258 - RNA, 19 nt, Artificial Sequence
  Description of Artificial Sequence: Synthetic oligonucleotide
uguuuauuuaaaauacuag

SEQ ID NO: 2259 - RNA, 19 nt, Artificial Sequence
  Description of Artificial Sequence: Synthetic oligonucleotide
guuuauuuaaaauacuagu

SEQ ID NO: 2260 - RNA, 19 nt, Artificial Sequence
  Description of Artificial Sequence: Synthetic oligonucleotide
uuuauuuaaaauacuagug

SEQ ID NO: 2261 - RNA, 19 nt, Artificial Sequence
  Description of Artificial Sequence: Synthetic oligonucleotide
uuauuuaaaauacuagugu

SEQ ID NO: 2262 - RNA, 19 nt, Artificial Sequence
  Description of Artificial Sequence: Synthetic oligonucleotide
uauuuaaaauacuaguguc

SEQ ID NO: 2263 - RNA, 19 nt, Artificial Sequence
  Description of Artificial Sequence: Synthetic oligonucleotide
auuuaaaauacuaguguca

SEQ ID NO: 2264 - RNA, 19 nt, Artificial Sequence
  Description of Artificial Sequence: Synthetic oligonucleotide
uuuaaaauacuagugucac

SEQ ID NO: 2265 - RNA, 19 nt, Artificial Sequence
  Description of Artificial Sequence: Synthetic oligonucleotide
uuaaaauacuagugucacu

SEQ ID NO: 2266 - RNA, 19 nt, Artificial Sequence
  Description of Artificial Sequence: Synthetic oligonucleotide
uaaaauacuagugucacuu

SEQ ID NO: 2267 - RNA, 19 nt, Artificial Sequence
  Description of Artificial Sequence: Synthetic oligonucleotide
aaaauacuagugucacuuu

SEQ ID NO: 2268 - RNA, 19 nt, Artificial Sequence
  Description of Artificial Sequence: Synthetic oligonucleotide
aaauacuagugucacuuuc

SEQ ID NO: 2269 - RNA, 19 nt, Artificial Sequence
  Description of Artificial Sequence: Synthetic oligonucleotide
aauacuagugucacuuucu

SEQ ID NO: 2270 - RNA, 19 nt, Artificial Sequence
  Description of Artificial Sequence: Synthetic oligonucleotide
auacuagugucacuuucug

SEQ ID NO: 2271 - RNA, 19 nt, Artificial Sequence
  Description of Artificial Sequence: Synthetic oligonucleotide
uacuagugucacuuucuga

SEQ ID NO: 2272 - RNA, 19 nt, Artificial Sequence
  Description of Artificial Sequence: Synthetic oligonucleotide
acuagugucacuuucugag

SEQ ID NO: 2273 - RNA, 19 nt, Artificial Sequence
  Description of Artificial Sequence: Synthetic oligonucleotide
cuagugucacuuucugagu

SEQ ID NO: 2274 - RNA, 19 nt, Artificial Sequence
  Description of Artificial Sequence: Synthetic oligonucleotide
uagugucacuuucugagua

SEQ ID NO: 2275 - RNA, 19 nt, Artificial Sequence
  Description of Artificial Sequence: Synthetic oligonucleotide
agugucacuuucugaguac

SEQ ID NO: 2276 - RNA, 19 nt, Artificial Sequence
  Description of Artificial Sequence: Synthetic oligonucleotide
gugucacuuucugaguacc

SEQ ID NO: 2277 - RNA, 19 nt, Artificial Sequence
  Description of Artificial Sequence: Synthetic oligonucleotide
ugucacuuucugaguaccc

SEQ ID NO: 2278 - RNA, 19 nt, Artificial Sequence
  Description of Artificial Sequence: Synthetic oligonucleotide
gucacuuucugaguacccg

SEQ ID NO: 2279 - RNA, 19 nt, Artificial Sequence
  Description of Artificial Sequence: Synthetic oligonucleotide
ucacuuucugaguacccgc

SEQ ID NO: 2280 - RNA, 19 nt, Artificial Sequence
  Description of Artificial Sequence: Synthetic oligonucleotide
cacuuucugaguacccgcc

SEQ ID NO: 2281 - RNA, 19 nt, Artificial Sequence
  Description of Artificial Sequence: Synthetic oligonucleotide
acuuucugaguacccgccg

SEQ ID NO: 2282 - RNA, 19 nt, Artificial Sequence
  Description of Artificial Sequence: Synthetic oligonucleotide
cuuucugaguacccgccgc

SEQ ID NO: 2283 - RNA, 19 nt, Artificial Sequence
  Description of Artificial Sequence: Synthetic oligonucleotide
uuucugaguacccgccgcu

SEQ ID NO: 2284 - RNA, 19 nt, Artificial Sequence
  Description of Artificial Sequence: Synthetic oligonucleotide
uucugaguacccgccgcuu

SEQ ID NO: 2285 - RNA, 19 nt, Artificial Sequence
  Description of Artificial Sequence: Synthetic oligonucleotide
ucugaguacccgccgcuuc

SEQ ID NO: 2286 - RNA, 19 nt, Artificial Sequence
  Description of Artificial Sequence: Synthetic oligonucleotide
cugaguacccgccgcuuca

SEQ ID NO: 2287 - RNA, 19 nt, Artificial Sequence
  Description of Artificial Sequence: Synthetic oligonucleotide
ugaguacccgccgcuucac

SEQ ID NO: 2288 - RNA, 19 nt, Artificial Sequence
  Description of Artificial Sequence: Synthetic oligonucleotide
gaguacccgccgcuucaca

SEQ ID NO: 2289 - RNA, 19 nt, Artificial Sequence
  Description of Artificial Sequence: Synthetic oligonucleotide
aguacccgccgcuucacag

SEQ ID NO: 2290 - RNA, 19 nt, Artificial Sequence
  Description of Artificial Sequence: Synthetic oligonucleotide
guacccgccgcuucacagg

SEQ ID NO: 2291 - RNA, 19 nt, Artificial Sequence
  Description of Artificial Sequence: Synthetic oligonucleotide
uacccgccgcuucacaggc

SEQ ID NO: 2292 - RNA, 19 nt, Artificial Sequence
  Description of Artificial Sequence: Synthetic oligonucleotide
acccgccgcuucacaggcu

SEQ ID NO: 2293 - RNA, 19 nt, Artificial Sequence
  Description of Artificial Sequence: Synthetic oligonucleotide
cccgccgcuucacaggcug

SEQ ID NO: 2294 - RNA, 19 nt, Artificial Sequence
  Description of Artificial Sequence: Synthetic oligonucleotide
ccgccgcuucacaggcuga

SEQ ID NO: 2295 - RNA, 19 nt, Artificial Sequence
  Description of Artificial Sequence: Synthetic oligonucleotide
cgccgcuucacaggcugag

SEQ ID NO: 2296 - RNA, 19 nt, Artificial Sequence
  Description of Artificial Sequence: Synthetic oligonucleotide
gccgcuucacaggcugagu

SEQ ID NO: 2297 - RNA, 19 nt, Artificial Sequence
  Description of Artificial Sequence: Synthetic oligonucleotide
ccgcuucacaggcugaguc

SEQ ID NO: 2298 - RNA, 19 nt, Artificial Sequence
  Description of Artificial Sequence: Synthetic oligonucleotide
cgcuucacaggcugagucc

SEQ ID NO: 2299 - RNA, 19 nt, Artificial Sequence
  Description of Artificial Sequence: Synthetic oligonucleotide
gcuucacaggcugagucca

SEQ ID NO: 2300 - RNA, 19 nt, Artificial Sequence
  Description of Artificial Sequence: Synthetic oligonucleotide
cuucacaggcugaguccag

SEQ ID NO: 2301 - RNA, 19 nt, Artificial Sequence
  Description of Artificial Sequence: Synthetic oligonucleotide
uucacaggcugaguccagg

SEQ ID NO: 2302 - RNA, 19 nt, Artificial Sequence
  Description of Artificial Sequence: Synthetic oligonucleotide
ucacaggcugaguccaggc

SEQ ID NO: 2303 - RNA, 19 nt, Artificial Sequence
  Description of Artificial Sequence: Synthetic oligonucleotide
cacaggcugaguccaggcc

SEQ ID NO: 2304 - RNA, 19 nt, Artificial Sequence
  Description of Artificial Sequence: Synthetic oligonucleotide
acaggcugaguccaggccu

SEQ ID NO: 2305 - RNA, 19 nt, Artificial Sequence
  Description of Artificial Sequence: Synthetic oligonucleotide
caggcugaguccaggccug

SEQ ID NO: 2306 - RNA, 19 nt, Artificial Sequence
  Description of Artificial Sequence: Synthetic oligonucleotide
aggcugaguccaggccugu

SEQ ID NO: 2307 - RNA, 19 nt, Artificial Sequence
  Description of Artificial Sequence: Synthetic oligonucleotide
ggcugaguccaggccugug

SEQ ID NO: 2308 - RNA, 19 nt, Artificial Sequence
  Description of Artificial Sequence: Synthetic oligonucleotide
gcugaguccaggccugugu

SEQ ID NO: 2309 - RNA, 19 nt, Artificial Sequence
  Description of Artificial Sequence: Synthetic oligonucleotide
cugaguccaggccugugug

SEQ ID NO: 2310 - RNA, 19 nt, Artificial Sequence
  Description of Artificial Sequence: Synthetic oligonucleotide
ugaguccaggccugugugc

SEQ ID NO: 2311 - RNA, 19 nt, Artificial Sequence
  Description of Artificial Sequence: Synthetic oligonucleotide
gaguccaggccugugugcu

SEQ ID NO: 2312 - RNA, 19 nt, Artificial Sequence
  Description of Artificial Sequence: Synthetic oligonucleotide
aguccaggccugugugcuu

SEQ ID NO: 2313 - RNA, 19 nt, Artificial Sequence
  Description of Artificial Sequence: Synthetic oligonucleotide
guccaggccugugugcuuu

SEQ ID NO: 2314 - RNA, 19 nt, Artificial Sequence
  Description of Artificial Sequence: Synthetic oligonucleotide
uccaggccugugugcuuug

SEQ ID NO: 2315 - RNA, 19 nt, Artificial Sequence
  Description of Artificial Sequence: Synthetic oligonucleotide
ccaggccugugugcuuugu

SEQ ID NO: 2316 - RNA, 19 nt, Artificial Sequence
  Description of Artificial Sequence: Synthetic oligonucleotide
caggccugugugcuuugua

SEQ ID NO: 2317 - RNA, 19 nt, Artificial Sequence
  Description of Artificial Sequence: Synthetic oligonucleotide
aggccugugugcuuuguag

SEQ ID NO: 2318 - RNA, 19 nt, Artificial Sequence
  Description of Artificial Sequence: Synthetic oligonucleotide
ggccugugugcuuuguaga

SEQ ID NO: 2319 - RNA, 19 nt, Artificial Sequence
  Description of Artificial Sequence: Synthetic oligonucleotide
gccugugugcuuuguagag

SEQ ID NO: 2320 - RNA, 19 nt, Artificial Sequence
  Description of Artificial Sequence: Synthetic oligonucleotide
ccugugugcuuuguagagc

SEQ ID NO: 2321 - RNA, 19 nt, Artificial Sequence
  Description of Artificial Sequence: Synthetic oligonucleotide
cugugugcuuuguagagcc

SEQ ID NO: 2322 - RNA, 19 nt, Artificial Sequence
  Description of Artificial Sequence: Synthetic oligonucleotide
ugugugcuuuguagagcca

SEQ ID NO: 2323 - RNA, 19 nt, Artificial Sequence
  Description of Artificial Sequence: Synthetic oligonucleotide
gugugcuuuguagagccag

SEQ ID NO: 2324 - RNA, 19 nt, Artificial Sequence
  Description of Artificial Sequence: Synthetic oligonucleotide
ugugcuuuguagagccagc

SEQ ID NO: 2325 - RNA, 19 nt, Artificial Sequence
  Description of Artificial Sequence: Synthetic oligonucleotide
gugcuuuguagagccagcu

SEQ ID NO: 2326 - RNA, 19 nt, Artificial Sequence
  Description of Artificial Sequence: Synthetic oligonucleotide
ugcuuuguagagccagcug

SEQ ID NO: 2327 - RNA, 19 nt, Artificial Sequence
  Description of Artificial Sequence: Synthetic oligonucleotide
gcuuuguagagccagcugc

SEQ ID NO: 2328 - RNA, 19 nt, Artificial Sequence
  Description of Artificial Sequence: Synthetic oligonucleotide
cuuuguagagccagcugcu

SEQ ID NO: 2329 - RNA, 19 nt, Artificial Sequence
  Description of Artificial Sequence: Synthetic oligonucleotide
uuuguagagccagcugcuu

SEQ ID NO: 2330 - RNA, 19 nt, Artificial Sequence
  Description of Artificial Sequence: Synthetic oligonucleotide
uuguagagccagcugcuug

SEQ ID NO: 2331 - RNA, 19 nt, Artificial Sequence
  Description of Artificial Sequence: Synthetic oligonucleotide
uguagagccagcugcuugc

SEQ ID NO: 2332 - RNA, 19 nt, Artificial Sequence
  Description of Artificial Sequence: Synthetic oligonucleotide
guagagccagcugcuugcu

SEQ ID NO: 2333 - RNA, 19 nt, Artificial Sequence
  Description of Artificial Sequence: Synthetic oligonucleotide
uagagccagcugcuugcuc

SEQ ID NO: 2334 - RNA, 19 nt, Artificial Sequence
  Description of Artificial Sequence: Synthetic oligonucleotide
agagccagcugcuugcuca

SEQ ID NO: 2335 - RNA, 19 nt, Artificial Sequence
  Description of Artificial Sequence: Synthetic oligonucleotide
gagccagcugcuugcucac

SEQ ID NO: 2336 - RNA, 19 nt, Artificial Sequence
  Description of Artificial Sequence: Synthetic oligonucleotide
agccagcugcuugcucaca

SEQ ID NO: 2337 - RNA, 19 nt, Artificial Sequence
  Description of Artificial Sequence: Synthetic oligonucleotide
gccagcugcuugcucacag

SEQ ID NO: 2338 - RNA, 19 nt, Artificial Sequence
  Description of Artificial Sequence: Synthetic oligonucleotide
ccagcugcuugcucacagc

SEQ ID NO: 2339 - RNA, 19 nt, Artificial Sequence
  Description of Artificial Sequence: Synthetic oligonucleotide
cagcugcuugcucacagcc

SEQ ID NO: 2340 - RNA, 19 nt, Artificial Sequence
  Description of Artificial Sequence: Synthetic oligonucleotide
agcugcuugcucacagcca

SEQ ID NO: 2341 - RNA, 19 nt, Artificial Sequence
  Description of Artificial Sequence: Synthetic oligonucleotide
gcugcuugcucacagccac

SEQ ID NO: 2342 - RNA, 19 nt, Artificial Sequence
  Description of Artificial Sequence: Synthetic oligonucleotide
cugcuugcucacagccaca

SEQ ID NO: 2343 - RNA, 19 nt, Artificial Sequence
  Description of Artificial Sequence: Synthetic oligonucleotide
ugcuugcucacagccacau

SEQ ID NO: 2344 - RNA, 19 nt, Artificial Sequence
  Description of Artificial Sequence: Synthetic oligonucleotide
gcuugcucacagccacauu

SEQ ID NO: 2345 - RNA, 19 nt, Artificial Sequence
  Description of Artificial Sequence: Synthetic oligonucleotide
cuugcucacagccacauuu

SEQ ID NO: 2346 - RNA, 19 nt, Artificial Sequence
  Description of Artificial Sequence: Synthetic oligonucleotide
uugcucacagccacauuuc

SEQ ID NO: 2347 - RNA, 19 nt, Artificial Sequence
  Description of Artificial Sequence: Synthetic oligonucleotide
ugcucacagccacauuucc

SEQ ID NO: 2348 - RNA, 19 nt, Artificial Sequence
  Description of Artificial Sequence: Synthetic oligonucleotide
gcucacagccacauuucca

SEQ ID NO: 2349 - RNA, 19 nt, Artificial Sequence
  Description of Artificial Sequence: Synthetic oligonucleotide
cucacagccacauuuccau

SEQ ID NO: 2350 - RNA, 19 nt, Artificial Sequence
  Description of Artificial Sequence: Synthetic oligonucleotide
ucacagccacauuuccauu

SEQ ID NO: 2351 - RNA, 19 nt, Artificial Sequence
  Description of Artificial Sequence: Synthetic oligonucleotide
cacagccacauuuccauuu

SEQ ID NO: 2352 - RNA, 19 nt, Artificial Sequence
  Description of Artificial Sequence: Synthetic oligonucleotide
acagccacauuuccauuug

SEQ ID NO: 2353 - RNA, 19 nt, Artificial Sequence
  Description of Artificial Sequence: Synthetic oligonucleotide
cagccacauuuccauuugc

SEQ ID NO: 2354 - RNA, 19 nt, Artificial Sequence
  Description of Artificial Sequence: Synthetic oligonucleotide
agccacauuuccauuugca

SEQ ID NO: 2355 - RNA, 19 nt, Artificial Sequence
  Description of Artificial Sequence: Synthetic oligonucleotide
gccacauuuccauuugcau

SEQ ID NO: 2356 - RNA, 19 nt, Artificial Sequence
  Description of Artificial Sequence: Synthetic oligonucleotide
ccacauuuccauuugcauc

SEQ ID NO: 2357 - RNA, 19 nt, Artificial Sequence
  Description of Artificial Sequence: Synthetic oligonucleotide
cacauuuccauuugcauca

SEQ ID NO: 2358 - RNA, 19 nt, Artificial Sequence
  Description of Artificial Sequence: Synthetic oligonucleotide
acauuuccauuugcaucau

SEQ ID NO: 2359 - RNA, 19 nt, Artificial Sequence
  Description of Artificial Sequence: Synthetic oligonucleotide
cauuuccauuugcaucauu

SEQ ID NO: 2360 - RNA, 19 nt, Artificial Sequence
  Description of Artificial Sequence: Synthetic oligonucleotide
auuuccauuugcaucauua

SEQ ID NO: 2361 - RNA, 19 nt, Artificial Sequence
  Description of Artificial Sequence: Synthetic oligonucleotide
uuuccauuugcaucauuac

SEQ ID NO: 2362 - RNA, 19 nt, Artificial Sequence
  Description of Artificial Sequence: Synthetic oligonucleotide
uuccauuugcaucauuacu

SEQ ID NO: 2363 - RNA, 19 nt, Artificial Sequence
  Description of Artificial Sequence: Synthetic oligonucleotide
uccauuugcaucauuacug

SEQ ID NO: 2364 - RNA, 19 nt, Artificial Sequence
  Description of Artificial Sequence: Synthetic oligonucleotide
ccauuugcaucauuacugc

SEQ ID NO: 2365 - RNA, 19 nt, Artificial Sequence
  Description of Artificial Sequence: Synthetic oligonucleotide
cauuugcaucauuacugcc

SEQ ID NO: 2366 - RNA, 19 nt, Artificial Sequence
  Description of Artificial Sequence: Synthetic oligonucleotide
auuugcaucauuacugccu

SEQ ID NO: 2367 - RNA, 19 nt, Artificial Sequence
  Description of Artificial Sequence: Synthetic oligonucleotide
uuugcaucauuacugccuu

SEQ ID NO: 2368 - RNA, 19 nt, Artificial Sequence
  Description of Artificial Sequence: Synthetic oligonucleotide
uugcaucauuacugccuuc

SEQ ID NO: 2369 - RNA, 19 nt, Artificial Sequence
  Description of Artificial Sequence: Synthetic oligonucleotide
ugcaucauuacugccuuca

SEQ ID NO: 2370 - RNA, 19 nt, Artificial Sequence
  Description of Artificial Sequence: Synthetic oligonucleotide
gcaucauuacugccuucac

SEQ ID NO: 2371 - RNA, 19 nt, Artificial Sequence
  Description of Artificial Sequence: Synthetic oligonucleotide
caucauuacugccuucacc

SEQ ID NO: 2372 - RNA, 19 nt, Artificial Sequence
  Description of Artificial Sequence: Synthetic oligonucleotide
aucauuacugccuucaccu

SEQ ID NO: 2373 - RNA, 19 nt, Artificial Sequence
  Description of Artificial Sequence: Synthetic oligonucleotide
ucauuacugccuucaccug

SEQ ID NO: 2374 - RNA, 19 nt, Artificial Sequence
  Description of Artificial Sequence: Synthetic oligonucleotide
cauuacugccuucaccugc

SEQ ID NO: 2375 - RNA, 19 nt, Artificial Sequence
  Description of Artificial Sequence: Synthetic oligonucleotide
auuacugccuucaccugca

SEQ ID NO: 2376 - RNA, 19 nt, Artificial Sequence
  Description of Artificial Sequence: Synthetic oligonucleotide
uuacugccuucaccugcau

SEQ ID NO: 2377 - RNA, 19 nt, Artificial Sequence
  Description of Artificial Sequence: Synthetic oligonucleotide
uacugccuucaccugcaua

SEQ ID NO: 2378 - RNA, 19 nt, Artificial Sequence
  Description of Artificial Sequence: Synthetic oligonucleotide
acugccuucaccugcauag

SEQ ID NO: 2379 - RNA, 19 nt, Artificial Sequence
  Description of Artificial Sequence: Synthetic oligonucleotide
cugccuucaccugcauagu

SEQ ID NO: 2380 - RNA, 19 nt, Artificial Sequence
  Description of Artificial Sequence: Synthetic oligonucleotide
ugccuucaccugcauaguc

SEQ ID NO: 2381 - RNA, 19 nt, Artificial Sequence
  Description of Artificial Sequence: Synthetic oligonucleotide
gccuucaccugcauaguca

SEQ ID NO: 2382 - RNA, 19 nt, Artificial Sequence
  Description of Artificial Sequence: Synthetic oligonucleotide
ccuucaccugcauagucac

SEQ ID NO: 2383 - RNA, 19 nt, Artificial Sequence
  Description of Artificial Sequence: Synthetic oligonucleotide
cuucaccugcauagucacu

SEQ ID NO: 2384 - RNA, 19 nt, Artificial Sequence
  Description of Artificial Sequence: Synthetic oligonucleotide
uucaccugcauagucacuc

SEQ ID NO: 2385 - RNA, 19 nt, Artificial Sequence
  Description of Artificial Sequence: Synthetic oligonucleotide
ucaccugcauagucacucu

SEQ ID NO: 2386 - RNA, 19 nt, Artificial Sequence
  Description of Artificial Sequence: Synthetic oligonucleotide
caccugcauagucacucuu

SEQ ID NO: 2387 - RNA, 19 nt, Artificial Sequence
  Description of Artificial Sequence: Synthetic oligonucleotide
accugcauagucacucuuu

SEQ ID NO: 2388 - RNA, 19 nt, Artificial Sequence
  Description of Artificial Sequence: Synthetic oligonucleotide
ccugcauagucacucuuuu

SEQ ID NO: 2389 - RNA, 19 nt, Artificial Sequence
  Description of Artificial Sequence: Synthetic oligonucleotide
cugcauagucacucuuuug

SEQ ID NO: 2390 - RNA, 19 nt, Artificial Sequence
  Description of Artificial Sequence: Synthetic oligonucleotide
ugcauagucacucuuuuga

SEQ ID NO: 2391 - RNA, 19 nt, Artificial Sequence
  Description of Artificial Sequence: Synthetic oligonucleotide
gcauagucacucuuuugau

SEQ ID NO: 2392 - RNA, 19 nt, Artificial Sequence
  Description of Artificial Sequence: Synthetic oligonucleotide
cauagucacucuuuugaug

SEQ ID NO: 2393 - RNA, 19 nt, Artificial Sequence
  Description of Artificial Sequence: Synthetic oligonucleotide
auagucacucuuuugaugc

SEQ ID NO: 2394 - RNA, 19 nt, Artificial Sequence
  Description of Artificial Sequence: Synthetic oligonucleotide
uagucacucuuuugaugcu

SEQ ID NO: 2395 - RNA, 19 nt, Artificial Sequence
  Description of Artificial Sequence: Synthetic oligonucleotide
agucacucuuuugaugcug

SEQ ID NO: 2396 - RNA, 19 nt, Artificial Sequence
  Description of Artificial Sequence: Synthetic oligonucleotide
gucacucuuuugaugcugg

SEQ ID NO: 2397 - RNA, 19 nt, Artificial Sequence
  Description of Artificial Sequence: Synthetic oligonucleotide
ucacucuuuugaugcuggg

SEQ ID NO: 2398 - RNA, 19 nt, Artificial Sequence
  Description of Artificial Sequence: Synthetic oligonucleotide
cacucuuuugaugcugggg

SEQ ID NO: 2399 - RNA, 19 nt, Artificial Sequence
  Description of Artificial Sequence: Synthetic oligonucleotide
acucuuuugaugcugggga

SEQ ID NO: 2400 - RNA, 19 nt, Artificial Sequence
  Description of Artificial Sequence: Synthetic oligonucleotide
cucuuuugaugcuggggaa

SEQ ID NO: 2401 - RNA, 19 nt, Artificial Sequence
  Description of Artificial Sequence: Synthetic oligonucleotide
ucuuuugaugcuggggaac

SEQ ID NO: 2402 - RNA, 19 nt, Artificial Sequence
  Description of Artificial Sequence: Synthetic oligonucleotide
cuuuugaugcuggggaacc

SEQ ID NO: 2403 - RNA, 19 nt, Artificial Sequence
  Description of Artificial Sequence: Synthetic oligonucleotide
uuuugaugcuggggaacca

SEQ ID NO: 2404 - RNA, 19 nt, Artificial Sequence
  Description of Artificial Sequence: Synthetic oligonucleotide
uuugaugcuggggaaccaa

SEQ ID NO: 2405 - RNA, 19 nt, Artificial Sequence
  Description of Artificial Sequence: Synthetic oligonucleotide
uugaugcuggggaaccaaa

SEQ ID NO: 2406 - RNA, 19 nt, Artificial Sequence
  Description of Artificial Sequence: Synthetic oligonucleotide
ugaugcuggggaaccaaaa

SEQ ID NO: 2407 - RNA, 19 nt, Artificial Sequence
  Description of Artificial Sequence: Synthetic oligonucleotide
gaugcuggggaaccaaaau

SEQ ID NO: 2408 - RNA, 19 nt, Artificial Sequence
  Description of Artificial Sequence: Synthetic oligonucleotide
augcuggggaaccaaaaug

SEQ ID NO: 2409 - RNA, 19 nt, Artificial Sequence
  Description of Artificial Sequence: Synthetic oligonucleotide
ugcuggggaaccaaaaugg

SEQ ID NO: 2410 - RNA, 19 nt, Artificial Sequence
  Description of Artificial Sequence: Synthetic oligonucleotide
gcuggggaaccaaaauggu

SEQ ID NO: 2411 - RNA, 19 nt, Artificial Sequence
  Description of Artificial Sequence: Synthetic oligonucleotide
cuggggaaccaaaauggug

SEQ ID NO: 2412 - RNA, 19 nt, Artificial Sequence
  Description of Artificial Sequence: Synthetic oligonucleotide
uggggaaccaaaaugguga

SEQ ID NO: 2413 - RNA, 19 nt, Artificial Sequence
  Description of Artificial Sequence: Synthetic oligonucleotide
ggggaaccaaaauggugau

SEQ ID NO: 2414 - RNA, 19 nt, Artificial Sequence
  Description of Artificial Sequence: Synthetic oligonucleotide
gggaaccaaaauggugaug

SEQ ID NO: 2415 - RNA, 19 nt, Artificial Sequence
  Description of Artificial Sequence: Synthetic oligonucleotide
ggaaccaaaauggugauga

SEQ ID NO: 2416 - RNA, 19 nt, Artificial Sequence
  Description of Artificial Sequence: Synthetic oligonucleotide
gaaccaaaauggugaugau

SEQ ID NO: 2417 - RNA, 19 nt, Artificial Sequence
  Description of Artificial Sequence: Synthetic oligonucleotide
aaccaaaauggugaugaua

SEQ ID NO: 2418 - RNA, 19 nt, Artificial Sequence
  Description of Artificial Sequence: Synthetic oligonucleotide
accaaaauggugaugauau

SEQ ID NO: 2419 - RNA, 19 nt, Artificial Sequence
  Description of Artificial Sequence: Synthetic oligonucleotide
ccaaaauggugaugauaua

SEQ ID NO: 2420 - RNA, 19 nt, Artificial Sequence
  Description of Artificial Sequence: Synthetic oligonucleotide
caaaauggugaugauauau

SEQ ID NO: 2421 - RNA, 19 nt, Artificial Sequence
  Description of Artificial Sequence: Synthetic oligonucleotide
aaaauggugaugauauaua

SEQ ID NO: 2422 - RNA, 19 nt, Artificial Sequence
  Description of Artificial Sequence: Synthetic oligonucleotide
aaauggugaugauauauag

SEQ ID NO: 2423 - RNA, 19 nt, Artificial Sequence
  Description of Artificial Sequence: Synthetic oligonucleotide
aauggugaugauauauaga

SEQ ID NO: 2424 - RNA, 19 nt, Artificial Sequence
  Description of Artificial Sequence: Synthetic oligonucleotide
auggugaugauauauagac

SEQ ID NO: 2425 - RNA, 19 nt, Artificial Sequence
  Description of Artificial Sequence: Synthetic oligonucleotide
uggugaugauauauagacu

SEQ ID NO: 2426 - RNA, 19 nt, Artificial Sequence
  Description of Artificial Sequence: Synthetic oligonucleotide
ggugaugauauauagacuu

SEQ ID NO: 2427 - RNA, 19 nt, Artificial Sequence
  Description of Artificial Sequence: Synthetic oligonucleotide
gugaugauauauagacuuu

SEQ ID NO: 2428 - RNA, 19 nt, Artificial Sequence
  Description of Artificial Sequence: Synthetic oligonucleotide
ugaugauauauagacuuua

SEQ ID NO: 2429 - RNA, 19 nt, Artificial Sequence
  Description of Artificial Sequence: Synthetic oligonucleotide
gaugauauauagacuuuau

SEQ ID NO: 2430 - RNA, 19 nt, Artificial Sequence
  Description of Artificial Sequence: Synthetic oligonucleotide
augauauauagacuuuaug

SEQ ID NO: 2431 - RNA, 19 nt, Artificial Sequence
  Description of Artificial Sequence: Synthetic oligonucleotide
ugauauauagacuuuaugu

SEQ ID NO: 2432 - RNA, 19 nt, Artificial Sequence
  Description of Artificial Sequence: Synthetic oligonucleotide
gauauauagacuuuaugua

SEQ ID NO: 2433 - RNA, 19 nt, Artificial Sequence
  Description of Artificial Sequence: Synthetic oligonucleotide
auauauagacuuuauguau

SEQ ID NO: 2434 - RNA, 19 nt, Artificial Sequence
  Description of Artificial Sequence: Synthetic oligonucleotide
uauauagacuuuauguaua

SEQ ID NO: 2435 - RNA, 19 nt, Artificial Sequence
  Description of Artificial Sequence: Synthetic oligonucleotide
auauagacuuuauguauag

SEQ ID NO: 2436 - RNA, 19 nt, Artificial Sequence
  Description of Artificial Sequence: Synthetic oligonucleotide
uauagacuuuauguauagc

SEQ ID NO: 2437 - RNA, 19 nt, Artificial Sequence
  Description of Artificial Sequence: Synthetic oligonucleotide
auagacuuuauguauagcc

SEQ ID NO: 2438 - RNA, 19 nt, Artificial Sequence
  Description of Artificial Sequence: Synthetic oligonucleotide
uagacuuuauguauagcca

SEQ ID NO: 2439 - RNA, 19 nt, Artificial Sequence
  Description of Artificial Sequence: Synthetic oligonucleotide
agacuuuauguauagccac

SEQ ID NO: 2440 - RNA, 19 nt, Artificial Sequence
  Description of Artificial Sequence: Synthetic oligonucleotide
gacuuuauguauagccaca

SEQ ID NO: 2441 - RNA, 19 nt, Artificial Sequence
  Description of Artificial Sequence: Synthetic oligonucleotide
acuuuauguauagccacag

SEQ ID NO: 2442 - RNA, 19 nt, Artificial Sequence
  Description of Artificial Sequence: Synthetic oligonucleotide
cuuuauguauagccacagu

SEQ ID NO: 2443 - RNA, 19 nt, Artificial Sequence
  Description of Artificial Sequence: Synthetic oligonucleotide
uuuauguauagccacaguu

SEQ ID NO: 2444 - RNA, 19 nt, Artificial Sequence
  Description of Artificial Sequence: Synthetic oligonucleotide
uuauguauagccacaguuc

SEQ ID NO: 2445 - RNA, 19 nt, Artificial Sequence
  Description of Artificial Sequence: Synthetic oligonucleotide
uauguauagccacaguuca

SEQ ID NO: 2446 - RNA, 19 nt, Artificial Sequence
  Description of Artificial Sequence: Synthetic oligonucleotide
auguauagccacaguucau

SEQ ID NO: 2447 - RNA, 19 nt, Artificial Sequence
  Description of Artificial Sequence: Synthetic oligonucleotide
uguauagccacaguucauc

SEQ ID NO: 2448 - RNA, 19 nt, Artificial Sequence
  Description of Artificial Sequence: Synthetic oligonucleotide
guauagccacaguucaucc

SEQ ID NO: 2449 - RNA, 19 nt, Artificial Sequence
  Description of Artificial Sequence: Synthetic oligonucleotide
uauagccacaguucauccc

SEQ ID NO: 2450 - RNA, 19 nt, Artificial Sequence
  Description of Artificial Sequence: Synthetic oligonucleotide
auagccacaguucaucccc

SEQ ID NO: 2451 - RNA, 19 nt, Artificial Sequence
  Description of Artificial Sequence: Synthetic oligonucleotide
uagccacaguucaucccca

SEQ ID NO: 2452 - RNA, 19 nt, Artificial Sequence
  Description of Artificial Sequence: Synthetic oligonucleotide
agccacaguucauccccaa

SEQ ID NO: 2453 - RNA, 19 nt, Artificial Sequence
  Description of Artificial Sequence: Synthetic oligonucleotide
gccacaguucauccccaac

SEQ ID NO: 2454 - RNA, 19 nt, Artificial Sequence
  Description of Artificial Sequence: Synthetic oligonucleotide
ccacaguucauccccaacc

SEQ ID NO: 2455 - RNA, 19 nt, Artificial Sequence
  Description of Artificial Sequence: Synthetic oligonucleotide
cacaguucauccccaaccc

SEQ ID NO: 2456 - RNA, 19 nt, Artificial Sequence
  Description of Artificial Sequence: Synthetic oligonucleotide
acaguucauccccaacccu

SEQ ID NO: 2457 - RNA, 19 nt, Artificial Sequence
  Description of Artificial Sequence: Synthetic oligonucleotide
caguucauccccaacccua

SEQ ID NO: 2458 - RNA, 19 nt, Artificial Sequence
  Description of Artificial Sequence: Synthetic oligonucleotide
aguucauccccaacccuag

SEQ ID NO: 2459 - RNA, 19 nt, Artificial Sequence
  Description of Artificial Sequence: Synthetic oligonucleotide
guucauccccaacccuagu

SEQ ID NO: 2460 - RNA, 19 nt, Artificial Sequence
  Description of Artificial Sequence: Synthetic oligonucleotide
uucauccccaacccuaguc

SEQ ID NO: 2461 - RNA, 19 nt, Artificial Sequence
  Description of Artificial Sequence: Synthetic oligonucleotide
ucauccccaacccuagucu

SEQ ID NO: 2462 - RNA, 19 nt, Artificial Sequence
  Description of Artificial Sequence: Synthetic oligonucleotide
cauccccaacccuagucuu

SEQ ID NO: 2463 - RNA, 19 nt, Artificial Sequence
  Description of Artificial Sequence: Synthetic oligonucleotide
auccccaacccuagucuuc

SEQ ID NO: 2464 - RNA, 19 nt, Artificial Sequence
  Description of Artificial Sequence: Synthetic oligonucleotide
uccccaacccuagucuucg

SEQ ID NO: 2465 - RNA, 19 nt, Artificial Sequence
  Description of Artificial Sequence: Synthetic oligonucleotide
ccccaacccuagucuucga

SEQ ID NO: 2466 - RNA, 19 nt, Artificial Sequence
  Description of Artificial Sequence: Synthetic oligonucleotide
cccaacccuagucuucgaa

SEQ ID NO: 2467 - RNA, 19 nt, Artificial Sequence
  Description of Artificial Sequence: Synthetic oligonucleotide
ccaacccuagucuucgaaa

SEQ ID NO: 2468 - RNA, 19 nt, Artificial Sequence
  Description of Artificial Sequence: Synthetic oligonucleotide
caacccuagucuucgaaau

SEQ ID NO: 2469 - RNA, 19 nt, Artificial Sequence
  Description of Artificial Sequence: Synthetic oligonucleotide
aacccuagucuucgaaaug

SEQ ID NO: 2470 - RNA, 19 nt, Artificial Sequence
  Description of Artificial Sequence: Synthetic oligonucleotide
acccuagucuucgaaaugu

SEQ ID NO: 2471 - RNA, 19 nt, Artificial Sequence
  Description of Artificial Sequence: Synthetic oligonucleotide
cccuagucuucgaaauguu

SEQ ID NO: 2472 - RNA, 19 nt, Artificial Sequence
  Description of Artificial Sequence: Synthetic oligonucleotide
ccuagucuucgaaauguua

SEQ ID NO: 2473 - RNA, 19 nt, Artificial Sequence
  Description of Artificial Sequence: Synthetic oligonucleotide
cuagucuucgaaauguuaa

SEQ ID NO: 2474 - RNA, 19 nt, Artificial Sequence
  Description of Artificial Sequence: Synthetic oligonucleotide
uagucuucgaaauguuaau

SEQ ID NO: 2475 - RNA, 19 nt, Artificial Sequence
  Description of Artificial Sequence: Synthetic oligonucleotide
agucuucgaaauguuaaua

SEQ ID NO: 2476 - RNA, 19 nt, Artificial Sequence
  Description of Artificial Sequence: Synthetic oligonucleotide
gucuucgaaauguuaauau

SEQ ID NO: 2477 - RNA, 19 nt, Artificial Sequence
  Description of Artificial Sequence: Synthetic oligonucleotide
ucuucgaaauguuaauauu

SEQ ID NO: 2478 - RNA, 19 nt, Artificial Sequence
  Description of Artificial Sequence: Synthetic oligonucleotide
cuucgaaauguuaauauuu

SEQ ID NO: 2479 - RNA, 19 nt, Artificial Sequence
  Description of Artificial Sequence: Synthetic oligonucleotide
uucgaaauguuaauauuug

SEQ ID NO: 2480 - RNA, 19 nt, Artificial Sequence
  Description of Artificial Sequence: Synthetic oligonucleotide
ucgaaauguuaauauuuga

SEQ ID NO: 2481 - RNA, 19 nt, Artificial Sequence
  Description of Artificial Sequence: Synthetic oligonucleotide
cgaaauguuaauauuugau

SEQ ID NO: 2482 - RNA, 19 nt, Artificial Sequence
  Description of Artificial Sequence: Synthetic oligonucleotide
gaaauguuaauauuugaua

SEQ ID NO: 2483 - RNA, 19 nt, Artificial Sequence
  Description of Artificial Sequence: Synthetic oligonucleotide
aaauguuaauauuugauaa

SEQ ID NO: 2484 - RNA, 19 nt, Artificial Sequence
  Description of Artificial Sequence: Synthetic oligonucleotide
aauguuaauauuugauaaa

SEQ ID NO: 2485 - RNA, 19 nt, Artificial Sequence
  Description of Artificial Sequence: Synthetic oligonucleotide
auguuaauauuugauaaau

SEQ ID NO: 2486 - RNA, 19 nt, Artificial Sequence
  Description of Artificial Sequence: Synthetic oligonucleotide
uguuaauauuugauaaauc

SEQ ID NO: 2487 - RNA, 19 nt, Artificial Sequence
  Description of Artificial Sequence: Synthetic oligonucleotide
guuaauauuugauaaaucu

SEQ ID NO: 2488 - RNA, 19 nt, Artificial Sequence
  Description of Artificial Sequence: Synthetic oligonucleotide
uuaauauuugauaaaucua

SEQ ID NO: 2489 - RNA, 19 nt, Artificial Sequence
  Description of Artificial Sequence: Synthetic oligonucleotide
uaauauuugauaaaucuag

SEQ ID NO: 2490 - RNA, 19 nt, Artificial Sequence
  Description of Artificial Sequence: Synthetic oligonucleotide
aauauuugauaaaucuaga

SEQ ID NO: 2491 - RNA, 19 nt, Artificial Sequence
  Description of Artificial Sequence: Synthetic oligonucleotide
auauuugauaaaucuagaa

SEQ ID NO: 2492 - RNA, 19 nt, Artificial Sequence
  Description of Artificial Sequence: Synthetic oligonucleotide
uauuugauaaaucuagaaa

SEQ ID NO: 2493 - RNA, 19 nt, Artificial Sequence
  Description of Artificial Sequence: Synthetic oligonucleotide
auuugauaaaucuagaaaa

SEQ ID NO: 2494 - RNA, 19 nt, Artificial Sequence
  Description of Artificial Sequence: Synthetic oligonucleotide
uuugauaaaucuagaaaau

SEQ ID NO: 2495 - RNA, 19 nt, Artificial Sequence
  Description of Artificial Sequence: Synthetic oligonucleotide
uugauaaaucuagaaaaug

SEQ ID NO: 2496 - RNA, 19 nt, Artificial Sequence
  Description of Artificial Sequence: Synthetic oligonucleotide
ugauaaaucuagaaaaugc

SEQ ID NO: 2497 - RNA, 19 nt, Artificial Sequence
  Description of Artificial Sequence: Synthetic oligonucleotide
gauaaaucuagaaaaugca

SEQ ID NO: 2498 - RNA, 19 nt, Artificial Sequence
  Description of Artificial Sequence: Synthetic oligonucleotide
auaaaucuagaaaaugcau

SEQ ID NO: 2499 - RNA, 19 nt, Artificial Sequence
  Description of Artificial Sequence: Synthetic oligonucleotide
uaaaucuagaaaaugcauu

SEQ ID NO: 2500 - RNA, 19 nt, Artificial Sequence
  Description of Artificial Sequence: Synthetic oligonucleotide
aaaucuagaaaaugcauuc

SEQ ID NO: 2501 - RNA, 19 nt, Artificial Sequence
  Description of Artificial Sequence: Synthetic oligonucleotide
aaucuagaaaaugcauuca

SEQ ID NO: 2502 - RNA, 19 nt, Artificial Sequence
  Description of Artificial Sequence: Synthetic oligonucleotide
aucuagaaaaugcauucau

SEQ ID NO: 2503 - RNA, 19 nt, Artificial Sequence
  Description of Artificial Sequence: Synthetic oligonucleotide
ucuagaaaaugcauucaua

SEQ ID NO: 2504 - RNA, 19 nt, Artificial Sequence
  Description of Artificial Sequence: Synthetic oligonucleotide
cuagaaaaugcauucauac

SEQ ID NO: 2505 - RNA, 19 nt, Artificial Sequence
  Description of Artificial Sequence: Synthetic oligonucleotide
uagaaaaugcauucauaca

SEQ ID NO: 2506 - RNA, 19 nt, Artificial Sequence
  Description of Artificial Sequence: Synthetic oligonucleotide
agaaaaugcauucauacaa

SEQ ID NO: 2507 - RNA, 19 nt, Artificial Sequence
  Description of Artificial Sequence: Synthetic oligonucleotide
gaaaaugcauucauacaau

SEQ ID NO: 2508 - RNA, 19 nt, Artificial Sequence
  Description of Artificial Sequence: Synthetic oligonucleotide
aaaaugcauucauacaauu

SEQ ID NO: 2509 - RNA, 19 nt, Artificial Sequence
  Description of Artificial Sequence: Synthetic oligonucleotide
aaaugcauucauacaauua

SEQ ID NO: 2510 - RNA, 19 nt, Artificial Sequence
  Description of Artificial Sequence: Synthetic oligonucleotide
aaugcauucauacaauuac

SEQ ID NO: 2511 - RNA, 19 nt, Artificial Sequence
  Description of Artificial Sequence: Synthetic oligonucleotide
augcauucauacaauuaca

SEQ ID NO: 2512 - RNA, 19 nt, Artificial Sequence
  Description of Artificial Sequence: Synthetic oligonucleotide
ugcauucauacaauuacag

SEQ ID NO: 2513 - RNA, 19 nt, Artificial Sequence
  Description of Artificial Sequence: Synthetic oligonucleotide
gcauucauacaauuacaga

SEQ ID NO: 2514 - RNA, 19 nt, Artificial Sequence
  Description of Artificial Sequence: Synthetic oligonucleotide
cauucauacaauuacagaa

SEQ ID NO: 2515 - RNA, 19 nt, Artificial Sequence
  Description of Artificial Sequence: Synthetic oligonucleotide
auucauacaauuacagaau

SEQ ID NO: 2516 - RNA, 19 nt, Artificial Sequence
  Description of Artificial Sequence: Synthetic oligonucleotide
uucauacaauuacagaauu

SEQ ID NO: 2517 - RNA, 19 nt, Artificial Sequence
  Description of Artificial Sequence: Synthetic oligonucleotide
ucauacaauuacagaauuc

SEQ ID NO: 2518 - RNA, 19 nt, Artificial Sequence
  Description of Artificial Sequence: Synthetic oligonucleotide
cauacaauuacagaauuca

SEQ ID NO: 2519 - RNA, 19 nt, Artificial Sequence
  Description of Artificial Sequence: Synthetic oligonucleotide
auacaauuacagaauucaa

SEQ ID NO: 2520 - RNA, 19 nt, Artificial Sequence
  Description of Artificial Sequence: Synthetic oligonucleotide
uacaauuacagaauucaaa

SEQ ID NO: 2521 - RNA, 19 nt, Artificial Sequence
  Description of Artificial Sequence: Synthetic oligonucleotide
acaauuacagaauucaaau

SEQ ID NO: 2522 - RNA, 19 nt, Artificial Sequence
  Description of Artificial Sequence: Synthetic oligonucleotide
caauuacagaauucaaaua

SEQ ID NO: 2523 - RNA, 19 nt, Artificial Sequence
  Description of Artificial Sequence: Synthetic oligonucleotide
aauuacagaauucaaauau

SEQ ID NO: 2524 - RNA, 19 nt, Artificial Sequence
  Description of Artificial Sequence: Synthetic oligonucleotide
auuacagaauucaaauauu

SEQ ID NO: 2525 - RNA, 19 nt, Artificial Sequence
  Description of Artificial Sequence: Synthetic oligonucleotide
uuacagaauucaaauauug

SEQ ID NO: 2526 - RNA, 19 nt, Artificial Sequence
  Description of Artificial Sequence: Synthetic oligonucleotide
uacagaauucaaauauugc

SEQ ID NO: 2527 - RNA, 19 nt, Artificial Sequence
  Description of Artificial Sequence: Synthetic oligonucleotide
acagaauucaaauauugca

SEQ ID NO: 2528 - RNA, 19 nt, Artificial Sequence
  Description of Artificial Sequence: Synthetic oligonucleotide
cagaauucaaauauugcaa

SEQ ID NO: 2529 - RNA, 19 nt, Artificial Sequence
  Description of Artificial Sequence: Synthetic oligonucleotide
agaauucaaauauugcaaa

SEQ ID NO: 2530 - RNA, 19 nt, Artificial Sequence
  Description of Artificial Sequence: Synthetic oligonucleotide
gaauucaaauauugcaaaa

SEQ ID NO: 2531 - RNA, 19 nt, Artificial Sequence
  Description of Artificial Sequence: Synthetic oligonucleotide
aauucaaauauugcaaaag

SEQ ID NO: 2532 - RNA, 19 nt, Artificial Sequence
  Description of Artificial Sequence: Synthetic oligonucleotide
auucaaauauugcaaaagg

SEQ ID NO: 2533 - RNA, 19 nt, Artificial Sequence
  Description of Artificial Sequence: Synthetic oligonucleotide
uucaaauauugcaaaagga

SEQ ID NO: 2534 - RNA, 19 nt, Artificial Sequence
  Description of Artificial Sequence: Synthetic oligonucleotide
ucaaauauugcaaaaggau

SEQ ID NO: 2535 - RNA, 19 nt, Artificial Sequence
  Description of Artificial Sequence: Synthetic oligonucleotide
caaauauugcaaaaggaug

SEQ ID NO: 2536 - RNA, 19 nt, Artificial Sequence
  Description of Artificial Sequence: Synthetic oligonucleotide
aaauauugcaaaaggaugu

SEQ ID NO: 2537 - RNA, 19 nt, Artificial Sequence
  Description of Artificial Sequence: Synthetic oligonucleotide
aauauugcaaaaggaugug

SEQ ID NO: 2538 - RNA, 19 nt, Artificial Sequence
  Description of Artificial Sequence: Synthetic oligonucleotide
auauugcaaaaggaugugu

SEQ ID NO: 2539 - RNA, 19 nt, Artificial Sequence
  Description of Artificial Sequence: Synthetic oligonucleotide
uauugcaaaaggaugugug

SEQ ID NO: 2540 - RNA, 19 nt, Artificial Sequence
  Description of Artificial Sequence: Synthetic oligonucleotide
auugcaaaaggaugugugu

SEQ ID NO: 2541 - RNA, 19 nt, Artificial Sequence
  Description of Artificial Sequence: Synthetic oligonucleotide
uugcaaaaggauguguguc

SEQ ID NO: 2542 - RNA, 19 nt, Artificial Sequence
  Description of Artificial Sequence: Synthetic oligonucleotide
ugcaaaaggaugugugucu

SEQ ID NO: 2543 - RNA, 19 nt, Artificial Sequence
  Description of Artificial Sequence: Synthetic oligonucleotide
gcaaaaggaugugugucuu

SEQ ID NO: 2544 - RNA, 19 nt, Artificial Sequence
  Description of Artificial Sequence: Synthetic oligonucleotide
caaaaggaugugugucuuu

SEQ ID NO: 2545 - RNA, 19 nt, Artificial Sequence
  Description of Artificial Sequence: Synthetic oligonucleotide
aaaaggaugugugucuuuc

SEQ ID NO: 2546 - RNA, 19 nt, Artificial Sequence
  Description of Artificial Sequence: Synthetic oligonucleotide
aaaggaugugugucuuucu

SEQ ID NO: 2547 - RNA, 19 nt, Artificial Sequence
  Description of Artificial Sequence: Synthetic oligonucleotide
aaggaugugugucuuucuc

SEQ ID NO: 2548 - RNA, 19 nt, Artificial Sequence
  Description of Artificial Sequence: Synthetic oligonucleotide
aggaugugugucuuucucc

SEQ ID NO: 2549 - RNA, 19 nt, Artificial Sequence
  Description of Artificial Sequence: Synthetic oligonucleotide
ggaugugugucuuucuccc

SEQ ID NO: 2550 - RNA, 19 nt, Artificial Sequence
  Description of Artificial Sequence: Synthetic oligonucleotide
gaugugugucuuucucccc

SEQ ID NO: 2551 - RNA, 19 nt, Artificial Sequence
  Description of Artificial Sequence: Synthetic oligonucleotide
augugugucuuucuccccg

SEQ ID NO: 2552 - RNA, 19 nt, Artificial Sequence
  Description of Artificial Sequence: Synthetic oligonucleotide
ugugugucuuucuccccga

SEQ ID NO: 2553 - RNA, 19 nt, Artificial Sequence
  Description of Artificial Sequence: Synthetic oligonucleotide
gugugucuuucuccccgag

SEQ ID NO: 2554 - RNA, 19 nt, Artificial Sequence
  Description of Artificial Sequence: Synthetic oligonucleotide
ugugucuuucuccccgagc

SEQ ID NO: 2555 - RNA, 19 nt, Artificial Sequence
  Description of Artificial Sequence: Synthetic oligonucleotide
gugucuuucuccccgagcu

SEQ ID NO: 2556 - RNA, 19 nt, Artificial Sequence
  Description of Artificial Sequence: Synthetic oligonucleotide
ugucuuucuccccgagcuc

SEQ ID NO: 2557 - RNA, 19 nt, Artificial Sequence
  Description of Artificial Sequence: Synthetic oligonucleotide
gucuuucuccccgagcucc

SEQ ID NO: 2558 - RNA, 19 nt, Artificial Sequence
  Description of Artificial Sequence: Synthetic oligonucleotide
ucuuucuccccgagcuccc

SEQ ID NO: 2559 - RNA, 19 nt, Artificial Sequence
  Description of Artificial Sequence: Synthetic oligonucleotide
cuuucuccccgagcucccc

SEQ ID NO: 2560 - RNA, 19 nt, Artificial Sequence
  Description of Artificial Sequence: Synthetic oligonucleotide
uuucuccccgagcuccccu

SEQ ID NO: 2561 - RNA, 19 nt, Artificial Sequence
  Description of Artificial Sequence: Synthetic oligonucleotide
uucuccccgagcuccccug

SEQ ID NO: 2562 - RNA, 19 nt, Artificial Sequence
  Description of Artificial Sequence: Synthetic oligonucleotide
ucuccccgagcuccccugu

SEQ ID NO: 2563 - RNA, 19 nt, Artificial Sequence
  Description of Artificial Sequence: Synthetic oligonucleotide
cuccccgagcuccccuguu

SEQ ID NO: 2564 - RNA, 19 nt, Artificial Sequence
  Description of Artificial Sequence: Synthetic oligonucleotide
uccccgagcuccccuguuc

SEQ ID NO: 2565 - RNA, 19 nt, Artificial Sequence
  Description of Artificial Sequence: Synthetic oligonucleotide
ccccgagcuccccuguucc

SEQ ID NO: 2566 - RNA, 19 nt, Artificial Sequence
  Description of Artificial Sequence: Synthetic oligonucleotide
cccgagcuccccuguuccc

SEQ ID NO: 2567 - RNA, 19 nt, Artificial Sequence
  Description of Artificial Sequence: Synthetic oligonucleotide
ccgagcuccccuguucccc

SEQ ID NO: 2568 - RNA, 19 nt, Artificial Sequence
  Description of Artificial Sequence: Synthetic oligonucleotide
cgagcuccccuguuccccu

SEQ ID NO: 2569 - RNA, 19 nt, Artificial Sequence
  Description of Artificial Sequence: Synthetic oligonucleotide
gagcuccccuguuccccuu

SEQ ID NO: 2570 - RNA, 19 nt, Artificial Sequence
  Description of Artificial Sequence: Synthetic oligonucleotide
agcuccccuguuccccuuc

SEQ ID NO: 2571 - RNA, 19 nt, Artificial Sequence
  Description of Artificial Sequence: Synthetic oligonucleotide
gcuccccuguuccccuuca

SEQ ID NO: 2572 - RNA, 19 nt, Artificial Sequence
  Description of Artificial Sequence: Synthetic oligonucleotide
cuccccuguuccccuucau

SEQ ID NO: 2573 - RNA, 19 nt, Artificial Sequence
  Description of Artificial Sequence: Synthetic oligonucleotide
uccccuguuccccuucauu

SEQ ID NO: 2574 - RNA, 19 nt, Artificial Sequence
  Description of Artificial Sequence: Synthetic oligonucleotide
ccccuguuccccuucauug

SEQ ID NO: 2575 - RNA, 19 nt, Artificial Sequence
  Description of Artificial Sequence: Synthetic oligonucleotide
cccuguuccccuucauuga

SEQ ID NO: 2576 - RNA, 19 nt, Artificial Sequence
  Description of Artificial Sequence: Synthetic oligonucleotide
ccuguuccccuucauugaa

SEQ ID NO: 2577 - RNA, 19 nt, Artificial Sequence
  Description of Artificial Sequence: Synthetic oligonucleotide
cuguuccccuucauugaaa

SEQ ID NO: 2578 - RNA, 19 nt, Artificial Sequence
  Description of Artificial Sequence: Synthetic oligonucleotide
uguuccccuucauugaaaa

SEQ ID NO: 2579 - RNA, 19 nt, Artificial Sequence
  Description of Artificial Sequence: Synthetic oligonucleotide
guuccccuucauugaaaac

SEQ ID NO: 2580 - RNA, 19 nt, Artificial Sequence
  Description of Artificial Sequence: Synthetic oligonucleotide
uuccccuucauugaaaacc

SEQ ID NO: 2581 - RNA, 19 nt, Artificial Sequence
  Description of Artificial Sequence: Synthetic oligonucleotide
uccccuucauugaaaacca

SEQ ID NO: 2582 - RNA, 19 nt, Artificial Sequence
  Description of Artificial Sequence: Synthetic oligonucleotide
ccccuucauugaaaaccac

SEQ ID NO: 2583 - RNA, 19 nt, Artificial Sequence
  Description of Artificial Sequence: Synthetic oligonucleotide
cccuucauugaaaaccacc

SEQ ID NO: 2584 - RNA, 19 nt, Artificial Sequence
  Description of Artificial Sequence: Synthetic oligonucleotide
ccuucauugaaaaccacca

SEQ ID NO: 2585 - RNA, 19 nt, Artificial Sequence
  Description of Artificial Sequence: Synthetic oligonucleotide
cuucauugaaaaccaccac

SEQ ID NO: 2586 - RNA, 19 nt, Artificial Sequence
  Description of Artificial Sequence: Synthetic oligonucleotide
uucauugaaaaccaccacg

SEQ ID NO: 2587 - RNA, 19 nt, Artificial Sequence
  Description of Artificial Sequence: Synthetic oligonucleotide
ucauugaaaaccaccacgg

SEQ ID NO: 2588 - RNA, 19 nt, Artificial Sequence
  Description of Artificial Sequence: Synthetic oligonucleotide
cauugaaaaccaccacggu

SEQ ID NO: 2589 - RNA, 19 nt, Artificial Sequence
  Description of Artificial Sequence: Synthetic oligonucleotide
auugaaaaccaccacggug

SEQ ID NO: 2590 - RNA, 19 nt, Artificial Sequence
  Description of Artificial Sequence: Synthetic oligonucleotide
uugaaaaccaccacggugc

SEQ ID NO: 2591 - RNA, 19 nt, Artificial Sequence
  Description of Artificial Sequence: Synthetic oligonucleotide
ugaaaaccaccacggugcc

SEQ ID NO: 2592 - RNA, 19 nt, Artificial Sequence
  Description of Artificial Sequence: Synthetic oligonucleotide
gaaaaccaccacggugcca

SEQ ID NO: 2593 - RNA, 19 nt, Artificial Sequence
  Description of Artificial Sequence: Synthetic oligonucleotide
aaaaccaccacggugccau

SEQ ID NO: 2594 - RNA, 19 nt, Artificial Sequence
  Description of Artificial Sequence: Synthetic oligonucleotide
aaaccaccacggugccauc

SEQ ID NO: 2595 - RNA, 19 nt, Artificial Sequence
  Description of Artificial Sequence: Synthetic oligonucleotide
aaccaccacggugccaucu

SEQ ID NO: 2596 - RNA, 19 nt, Artificial Sequence
  Description of Artificial Sequence: Synthetic oligonucleotide
accaccacggugccaucuc

SEQ ID NO: 2597 - RNA, 19 nt, Artificial Sequence
  Description of Artificial Sequence: Synthetic oligonucleotide
ccaccacggugccaucucu

SEQ ID NO: 2598 - RNA, 19 nt, Artificial Sequence
  Description of Artificial Sequence: Synthetic oligonucleotide
caccacggugccaucucuu

SEQ ID NO: 2599 - RNA, 19 nt, Artificial Sequence
  Description of Artificial Sequence: Synthetic oligonucleotide
accacggugccaucucuug

SEQ ID NO: 2600 - RNA, 19 nt, Artificial Sequence
  Description of Artificial Sequence: Synthetic oligonucleotide
ccacggugccaucucuugu

SEQ ID NO: 2601 - RNA, 19 nt, Artificial Sequence
  Description of Artificial Sequence: Synthetic oligonucleotide
cacggugccaucucuugug

SEQ ID NO: 2602 - RNA, 19 nt, Artificial Sequence
  Description of Artificial Sequence: Synthetic oligonucleotide
acggugccaucucuugugu

SEQ ID NO: 2603 - RNA, 19 nt, Artificial Sequence
  Description of Artificial Sequence: Synthetic oligonucleotide
cggugccaucucuugugua

SEQ ID NO: 2604 - RNA, 19 nt, Artificial Sequence
  Description of Artificial Sequence: Synthetic oligonucleotide
ggugccaucucuuguguau

SEQ ID NO: 2605 - RNA, 19 nt, Artificial Sequence
  Description of Artificial Sequence: Synthetic oligonucleotide
gugccaucucuuguguaug

SEQ ID NO: 2606 - RNA, 19 nt, Artificial Sequence
  Description of Artificial Sequence: Synthetic oligonucleotide
ugccaucucuuguguaugc

SEQ ID NO: 2607 - RNA, 19 nt, Artificial Sequence
  Description of Artificial Sequence: Synthetic oligonucleotide
gccaucucuuguguaugca

SEQ ID NO: 2608 - RNA, 19 nt, Artificial Sequence
  Description of Artificial Sequence: Synthetic oligonucleotide
ccaucucuuguguaugcag

SEQ ID NO: 2609 - RNA, 19 nt, Artificial Sequence
  Description of Artificial Sequence: Synthetic oligonucleotide
caucucuuguguaugcagg

SEQ ID NO: 2610 - RNA, 19 nt, Artificial Sequence
  Description of Artificial Sequence: Synthetic oligonucleotide
aucucuuguguaugcaggg

SEQ ID NO: 2611 - RNA, 19 nt, Artificial Sequence
  Description of Artificial Sequence: Synthetic oligonucleotide
ucucuuguguaugcagggc

SEQ ID NO: 2612 - RNA, 19 nt, Artificial Sequence
  Description of Artificial Sequence: Synthetic oligonucleotide
cucuuguguaugcagggcu

SEQ ID NO: 2613 - RNA, 19 nt, Artificial Sequence
  Description of Artificial Sequence: Synthetic oligonucleotide
ucuuguguaugcagggcua

SEQ ID NO: 2614 - RNA, 19 nt, Artificial Sequence
  Description of Artificial Sequence: Synthetic oligonucleotide
cuuguguaugcagggcuau

SEQ ID NO: 2615 - RNA, 19 nt, Artificial Sequence
  Description of Artificial Sequence: Synthetic oligonucleotide
uuguguaugcagggcuaug

SEQ ID NO: 2616 - RNA, 19 nt, Artificial Sequence
  Description of Artificial Sequence: Synthetic oligonucleotide
uguguaugcagggcuaugc

SEQ ID NO: 2617 - RNA, 19 nt, Artificial Sequence
  Description of Artificial Sequence: Synthetic oligonucleotide
guguaugcagggcuaugca

SEQ ID NO: 2618 - RNA, 19 nt, Artificial Sequence
  Description of Artificial Sequence: Synthetic oligonucleotide
uguaugcagggcuaugcac

SEQ ID NO: 2619 - RNA, 19 nt, Artificial Sequence
  Description of Artificial Sequence: Synthetic oligonucleotide
guaugcagggcuaugcacc

SEQ ID NO: 2620 - RNA, 19 nt, Artificial Sequence
  Description of Artificial Sequence: Synthetic oligonucleotide
uaugcagggcuaugcaccu

SEQ ID NO: 2621 - RNA, 19 nt, Artificial Sequence
  Description of Artificial Sequence: Synthetic oligonucleotide
augcagggcuaugcaccug

SEQ ID NO: 2622 - RNA, 19 nt, Artificial Sequence
  Description of Artificial Sequence: Synthetic oligonucleotide
ugcagggcuaugcaccugc

SEQ ID NO: 2623 - RNA, 19 nt, Artificial Sequence
  Description of Artificial Sequence: Synthetic oligonucleotide
gcagggcuaugcaccugca

SEQ ID NO: 2624 - RNA, 19 nt, Artificial Sequence
  Description of Artificial Sequence: Synthetic oligonucleotide
cagggcuaugcaccugcag

SEQ ID NO: 2625 - RNA, 19 nt, Artificial Sequence
  Description of Artificial Sequence: Synthetic oligonucleotide
agggcuaugcaccugcagg

SEQ ID NO: 2626 - RNA, 19 nt, Artificial Sequence
  Description of Artificial Sequence: Synthetic oligonucleotide
gggcuaugcaccugcaggc

SEQ ID NO: 2627 - RNA, 19 nt, Artificial Sequence
  Description of Artificial Sequence: Synthetic oligonucleotide
ggcuaugcaccugcaggca

SEQ ID NO: 2628 - RNA, 19 nt, Artificial Sequence
  Description of Artificial Sequence: Synthetic oligonucleotide
gcuaugcaccugcaggcac

SEQ ID NO: 2629 - RNA, 19 nt, Artificial Sequence
  Description of Artificial Sequence: Synthetic oligonucleotide
cuaugcaccugcaggcacg

SEQ ID NO: 2630 - RNA, 19 nt, Artificial Sequence
  Description of Artificial Sequence: Synthetic oligonucleotide
uaugcaccugcaggcacgu

SEQ ID NO: 2631 - RNA, 19 nt, Artificial Sequence
  Description of Artificial Sequence: Synthetic oligonucleotide
augcaccugcaggcacgug

SEQ ID NO: 2632 - RNA, 19 nt, Artificial Sequence
  Description of Artificial Sequence: Synthetic oligonucleotide
ugcaccugcaggcacgugu

SEQ ID NO: 2633 - RNA, 19 nt, Artificial Sequence
  Description of Artificial Sequence: Synthetic oligonucleotide
gcaccugcaggcacgugug

SEQ ID NO: 2634 - RNA, 19 nt, Artificial Sequence
  Description of Artificial Sequence: Synthetic oligonucleotide
caccugcaggcacgugugu

SEQ ID NO: 2635 - RNA, 19 nt, Artificial Sequence
  Description of Artificial Sequence: Synthetic oligonucleotide
accugcaggcacgugugua

SEQ ID NO: 2636 - RNA, 19 nt, Artificial Sequence
  Description of Artificial Sequence: Synthetic oligonucleotide
ccugcaggcacguguguau

SEQ ID NO: 2637 - RNA, 19 nt, Artificial Sequence
  Description of Artificial Sequence: Synthetic oligonucleotide
cugcaggcacguguguaug

SEQ ID NO: 2638 - RNA, 19 nt, Artificial Sequence
  Description of Artificial Sequence: Synthetic oligonucleotide
ugcaggcacguguguaugc

SEQ ID NO: 2639 - RNA, 19 nt, Artificial Sequence
  Description of Artificial Sequence: Synthetic oligonucleotide
gcaggcacguguguaugca

SEQ ID NO: 2640 - RNA, 19 nt, Artificial Sequence
  Description of Artificial Sequence: Synthetic oligonucleotide
caggcacguguguaugcac

SEQ ID NO: 2641 - RNA, 19 nt, Artificial Sequence
  Description of Artificial Sequence: Synthetic oligonucleotide
aggcacguguguaugcacu

SEQ ID NO: 2642 - RNA, 19 nt, Artificial Sequence
  Description of Artificial Sequence: Synthetic oligonucleotide
ggcacguguguaugcacuc

SEQ ID NO: 2643 - RNA, 19 nt, Artificial Sequence
  Description of Artificial Sequence: Synthetic oligonucleotide
gcacguguguaugcacucc

SEQ ID NO: 2644 - RNA, 19 nt, Artificial Sequence
  Description of Artificial Sequence: Synthetic oligonucleotide
cacguguguaugcacuccc

SEQ ID NO: 2645 - RNA, 19 nt, Artificial Sequence
  Description of Artificial Sequence: Synthetic oligonucleotide
acguguguaugcacucccc

SEQ ID NO: 2646 - RNA, 19 nt, Artificial Sequence
  Description of Artificial Sequence: Synthetic oligonucleotide
cguguguaugcacuccccg

SEQ ID NO: 2647 - RNA, 19 nt, Artificial Sequence
  Description of Artificial Sequence: Synthetic oligonucleotide
guguguaugcacuccccgc

SEQ ID NO: 2648 - RNA, 19 nt, Artificial Sequence
  Description of Artificial Sequence: Synthetic oligonucleotide
uguguaugcacuccccgcu

SEQ ID NO: 2649 - RNA, 19 nt, Artificial Sequence
  Description of Artificial Sequence: Synthetic oligonucleotide
guguaugcacuccccgcuu

SEQ ID NO: 2650 - RNA, 19 nt, Artificial Sequence
  Description of Artificial Sequence: Synthetic oligonucleotide
uguaugcacuccccgcuug

SEQ ID NO: 2651 - RNA, 19 nt, Artificial Sequence
  Description of Artificial Sequence: Synthetic oligonucleotide
guaugcacuccccgcuugu

SEQ ID NO: 2652 - RNA, 19 nt, Artificial Sequence
  Description of Artificial Sequence: Synthetic oligonucleotide
uaugcacuccccgcuugug

SEQ ID NO: 2653 - RNA, 19 nt, Artificial Sequence
  Description of Artificial Sequence: Synthetic oligonucleotide
augcacuccccgcuugugu

SEQ ID NO: 2654 - RNA, 19 nt, Artificial Sequence
  Description of Artificial Sequence: Synthetic oligonucleotide
ugcacuccccgcuuguguu

SEQ ID NO: 2655 - RNA, 19 nt, Artificial Sequence
  Description of Artificial Sequence: Synthetic oligonucleotide
gcacuccccgcuuguguuu

SEQ ID NO: 2656 - RNA, 19 nt, Artificial Sequence
  Description of Artificial Sequence: Synthetic oligonucleotide
cacuccccgcuuguguuua

SEQ ID NO: 2657 - RNA, 19 nt, Artificial Sequence
  Description of Artificial Sequence: Synthetic oligonucleotide
acuccccgcuuguguuuac

SEQ ID NO: 2658 - RNA, 19 nt, Artificial Sequence
  Description of Artificial Sequence: Synthetic oligonucleotide
cuccccgcuuguguuuaca

SEQ ID NO: 2659 - RNA, 19 nt, Artificial Sequence
  Description of Artificial Sequence: Synthetic oligonucleotide
uccccgcuuguguuuacac

SEQ ID NO: 2660 - RNA, 19 nt, Artificial Sequence
  Description of Artificial Sequence: Synthetic oligonucleotide
ccccgcuuguguuuacaca

SEQ ID NO: 2661 - RNA, 19 nt, Artificial Sequence
  Description of Artificial Sequence: Synthetic oligonucleotide
cccgcuuguguuuacacaa

SEQ ID NO: 2662 - RNA, 19 nt, Artificial Sequence
  Description of Artificial Sequence: Synthetic oligonucleotide
ccgcuuguguuuacacaag

SEQ ID NO: 2663 - RNA, 19 nt, Artificial Sequence
  Description of Artificial Sequence: Synthetic oligonucleotide
cgcuuguguuuacacaagc

SEQ ID NO: 2664 - RNA, 19 nt, Artificial Sequence
  Description of Artificial Sequence: Synthetic oligonucleotide
gcuuguguuuacacaagcu

SEQ ID NO: 2665 - RNA, 19 nt, Artificial Sequence
  Description of Artificial Sequence: Synthetic oligonucleotide
cuuguguuuacacaagcug

SEQ ID NO: 2666 - RNA, 19 nt, Artificial Sequence
  Description of Artificial Sequence: Synthetic oligonucleotide
uuguguuuacacaagcugu

SEQ ID NO: 2667 - RNA, 19 nt, Artificial Sequence
  Description of Artificial Sequence: Synthetic oligonucleotide
uguguuuacacaagcugug

SEQ ID NO: 2668 - RNA, 19 nt, Artificial Sequence
  Description of Artificial Sequence: Synthetic oligonucleotide
guguuuacacaagcugugg

SEQ ID NO: 2669 - RNA, 19 nt, Artificial Sequence
  Description of Artificial Sequence: Synthetic oligonucleotide
uguuuacacaagcuguggg

SEQ ID NO: 2670 - RNA, 19 nt, Artificial Sequence
  Description of Artificial Sequence: Synthetic oligonucleotide
guuuacacaagcugugggg

SEQ ID NO: 2671 - RNA, 19 nt, Artificial Sequence
  Description of Artificial Sequence: Synthetic oligonucleotide
uuuacacaagcuguggggu

SEQ ID NO: 2672 - RNA, 19 nt, Artificial Sequence
  Description of Artificial Sequence: Synthetic oligonucleotide
uuacacaagcuguggggug

SEQ ID NO: 2673 - RNA, 19 nt, Artificial Sequence
  Description of Artificial Sequence: Synthetic oligonucleotide
uacacaagcuguggggugu

SEQ ID NO: 2674 - RNA, 19 nt, Artificial Sequence
  Description of Artificial Sequence: Synthetic oligonucleotide
acacaagcugugggguguu

SEQ ID NO: 2675 - RNA, 19 nt, Artificial Sequence
  Description of Artificial Sequence: Synthetic oligonucleotide
cacaagcugugggguguua

SEQ ID NO: 2676 - RNA, 19 nt, Artificial Sequence
  Description of Artificial Sequence: Synthetic oligonucleotide
acaagcugugggguguuac

SEQ ID NO: 2677 - RNA, 19 nt, Artificial Sequence
  Description of Artificial Sequence: Synthetic oligonucleotide
caagcugugggguguuacg

SEQ ID NO: 2678 - RNA, 19 nt, Artificial Sequence
  Description of Artificial Sequence: Synthetic oligonucleotide
aagcugugggguguuacgc

SEQ ID NO: 2679 - RNA, 19 nt, Artificial Sequence
  Description of Artificial Sequence: Synthetic oligonucleotide
agcugugggguguuacgca

SEQ ID NO: 2680 - RNA, 19 nt, Artificial Sequence
  Description of Artificial Sequence: Synthetic oligonucleotide
gcugugggguguuacgcau

SEQ ID NO: 2681 - RNA, 19 nt, Artificial Sequence
  Description of Artificial Sequence: Synthetic oligonucleotide
cugugggguguuacgcaug

SEQ ID NO: 2682 - RNA, 19 nt, Artificial Sequence
  Description of Artificial Sequence: Synthetic oligonucleotide
ugugggguguuacgcaugc

SEQ ID NO: 2683 - RNA, 19 nt, Artificial Sequence
  Description of Artificial Sequence: Synthetic oligonucleotide
gugggguguuacgcaugcc

SEQ ID NO: 2684 - RNA, 19 nt, Artificial Sequence
  Description of Artificial Sequence: Synthetic oligonucleotide
ugggguguuacgcaugccu

SEQ ID NO: 2685 - RNA, 19 nt, Artificial Sequence
  Description of Artificial Sequence: Synthetic oligonucleotide
gggguguuacgcaugccug

SEQ ID NO: 2686 - RNA, 19 nt, Artificial Sequence
  Description of Artificial Sequence: Synthetic oligonucleotide
ggguguuacgcaugccugc

SEQ ID NO: 2687 - RNA, 19 nt, Artificial Sequence
  Description of Artificial Sequence: Synthetic oligonucleotide
gguguuacgcaugccugcu

SEQ ID NO: 2688 - RNA, 19 nt, Artificial Sequence
  Description of Artificial Sequence: Synthetic oligonucleotide
guguuacgcaugccugcuu

SEQ ID NO: 2689 - RNA, 19 nt, Artificial Sequence
  Description of Artificial Sequence: Synthetic oligonucleotide
uguuacgcaugccugcuuu

SEQ ID NO: 2690 - RNA, 19 nt, Artificial Sequence
  Description of Artificial Sequence: Synthetic oligonucleotide
guuacgcaugccugcuuuu

SEQ ID NO: 2691 - RNA, 19 nt, Artificial Sequence
  Description of Artificial Sequence: Synthetic oligonucleotide
uuacgcaugccugcuuuuu

SEQ ID NO: 2692 - RNA, 19 nt, Artificial Sequence
  Description of Artificial Sequence: Synthetic oligonucleotide
uacgcaugccugcuuuuuu

SEQ ID NO: 2693 - RNA, 19 nt, Artificial Sequence
  Description of Artificial Sequence: Synthetic oligonucleotide
acgcaugccugcuuuuuuc

SEQ ID NO: 2694 - RNA, 19 nt, Artificial Sequence
  Description of Artificial Sequence: Synthetic oligonucleotide
cgcaugccugcuuuuuuca

SEQ ID NO: 2695 - RNA, 19 nt, Artificial Sequence
  Description of Artificial Sequence: Synthetic oligonucleotide
gcaugccugcuuuuuucac

SEQ ID NO: 2696 - RNA, 19 nt, Artificial Sequence
  Description of Artificial Sequence: Synthetic oligonucleotide
caugccugcuuuuuucacu

SEQ ID NO: 2697 - RNA, 19 nt, Artificial Sequence
  Description of Artificial Sequence: Synthetic oligonucleotide
augccugcuuuuuucacuu

SEQ ID NO: 2698 - RNA, 19 nt, Artificial Sequence
  Description of Artificial Sequence: Synthetic oligonucleotide
ugccugcuuuuuucacuua

SEQ ID NO: 2699 - RNA, 19 nt, Artificial Sequence
  Description of Artificial Sequence: Synthetic oligonucleotide
gccugcuuuuuucacuuaa

SEQ ID NO: 2700 - RNA, 19 nt, Artificial Sequence
  Description of Artificial Sequence: Synthetic oligonucleotide
ccugcuuuuuucacuuaau

SEQ ID NO: 2701 - RNA, 19 nt, Artificial Sequence
  Description of Artificial Sequence: Synthetic oligonucleotide
cugcuuuuuucacuuaaua

SEQ ID NO: 2702 - RNA, 19 nt, Artificial Sequence
  Description of Artificial Sequence: Synthetic oligonucleotide
ugcuuuuuucacuuaauaa

SEQ ID NO: 2703 - RNA, 19 nt, Artificial Sequence
  Description of Artificial Sequence: Synthetic oligonucleotide
gcuuuuuucacuuaauaau

SEQ ID NO: 2704 - RNA, 19 nt, Artificial Sequence
  Description of Artificial Sequence: Synthetic oligonucleotide
cuuuuuucacuuaauaaua

SEQ ID NO: 2705 - RNA, 19 nt, Artificial Sequence
  Description of Artificial Sequence: Synthetic oligonucleotide
uuuuuucacuuaauaauac

SEQ ID NO: 2706 - RNA, 19 nt, Artificial Sequence
  Description of Artificial Sequence: Synthetic oligonucleotide
uuuuucacuuaauaauaca

SEQ ID NO: 2707 - RNA, 19 nt, Artificial Sequence
  Description of Artificial Sequence: Synthetic oligonucleotide
uuuucacuuaauaauacag

SEQ ID NO: 2708 - RNA, 19 nt, Artificial Sequence
  Description of Artificial Sequence: Synthetic oligonucleotide
uuucacuuaauaauacagc

SEQ ID NO: 2709 - RNA, 19 nt, Artificial Sequence
  Description of Artificial Sequence: Synthetic oligonucleotide
uucacuuaauaauacagcu

SEQ ID NO: 2710 - RNA, 19 nt, Artificial Sequence
  Description of Artificial Sequence: Synthetic oligonucleotide
ucacuuaauaauacagcuu

SEQ ID NO: 2711 - RNA, 19 nt, Artificial Sequence
  Description of Artificial Sequence: Synthetic oligonucleotide
cacuuaauaauacagcuug

SEQ ID NO: 2712 - RNA, 19 nt, Artificial Sequence
  Description of Artificial Sequence: Synthetic oligonucleotide
acuuaauaauacagcuugg

SEQ ID NO: 2713 - RNA, 19 nt, Artificial Sequence
  Description of Artificial Sequence: Synthetic oligonucleotide
cuuaauaauacagcuugga

SEQ ID NO: 2714 - RNA, 19 nt, Artificial Sequence
  Description of Artificial Sequence: Synthetic oligonucleotide
uuaauaauacagcuuggag

SEQ ID NO: 2715 - RNA, 19 nt, Artificial Sequence
  Description of Artificial Sequence: Synthetic oligonucleotide
uaauaauacagcuuggaga

SEQ ID NO: 2716 - RNA, 19 nt, Artificial Sequence
  Description of Artificial Sequence: Synthetic oligonucleotide
aauaauacagcuuggagag

SEQ ID NO: 2717 - RNA, 19 nt, Artificial Sequence
  Description of Artificial Sequence: Synthetic oligonucleotide
auaauacagcuuggagaga

SEQ ID NO: 2718 - RNA, 19 nt, Artificial Sequence
  Description of Artificial Sequence: Synthetic oligonucleotide
uaauacagcuuggagagau

SEQ ID NO: 2719 - RNA, 19 nt, Artificial Sequence
  Description of Artificial Sequence: Synthetic oligonucleotide
aauacagcuuggagagauu

SEQ ID NO: 2720 - RNA, 19 nt, Artificial Sequence
  Description of Artificial Sequence: Synthetic oligonucleotide
auacagcuuggagagauuu

SEQ ID NO: 2721 - RNA, 19 nt, Artificial Sequence
  Description of Artificial Sequence: Synthetic oligonucleotide
uacagcuuggagagauuuu

SEQ ID NO: 2722 - RNA, 19 nt, Artificial Sequence
  Description of Artificial Sequence: Synthetic oligonucleotide
acagcuuggagagauuuuu

SEQ ID NO: 2723 - RNA, 19 nt, Artificial Sequence
  Description of Artificial Sequence: Synthetic oligonucleotide
cagcuuggagagauuuuug

SEQ ID NO: 2724 - RNA, 19 nt, Artificial Sequence
  Description of Artificial Sequence: Synthetic oligonucleotide
agcuuggagagauuuuugu

SEQ ID NO: 2725 - RNA, 19 nt, Artificial Sequence
  Description of Artificial Sequence: Synthetic oligonucleotide
gcuuggagagauuuuugua

SEQ ID NO: 2726 - RNA, 19 nt, Artificial Sequence
  Description of Artificial Sequence: Synthetic oligonucleotide
cuuggagagauuuuuguau

SEQ ID NO: 2727 - RNA, 19 nt, Artificial Sequence
  Description of Artificial Sequence: Synthetic oligonucleotide
uuggagagauuuuuguauc

SEQ ID NO: 2728 - RNA, 19 nt, Artificial Sequence
  Description of Artificial Sequence: Synthetic oligonucleotide
uggagagauuuuuguauca

SEQ ID NO: 2729 - RNA, 19 nt, Artificial Sequence
  Description of Artificial Sequence: Synthetic oligonucleotide
ggagagauuuuuguaucac

SEQ ID NO: 2730 - RNA, 19 nt, Artificial Sequence
  Description of Artificial Sequence: Synthetic oligonucleotide
gagagauuuuuguaucaca

SEQ ID NO: 2731 - RNA, 19 nt, Artificial Sequence
  Description of Artificial Sequence: Synthetic oligonucleotide
agagauuuuuguaucacau

SEQ ID NO: 2732 - RNA, 19 nt, Artificial Sequence
  Description of Artificial Sequence: Synthetic oligonucleotide
gagauuuuuguaucacauu

SEQ ID NO: 2733 - RNA, 19 nt, Artificial Sequence
  Description of Artificial Sequence: Synthetic oligonucleotide
agauuuuuguaucacauua

SEQ ID NO: 2734 - RNA, 19 nt, Artificial Sequence
  Description of Artificial Sequence: Synthetic oligonucleotide
gauuuuuguaucacauuau

SEQ ID NO: 2735 - RNA, 19 nt, Artificial Sequence
  Description of Artificial Sequence: Synthetic oligonucleotide
auuuuuguaucacauuaua

SEQ ID NO: 2736 - RNA, 19 nt, Artificial Sequence
  Description of Artificial Sequence: Synthetic oligonucleotide
uuuuuguaucacauuauaa

SEQ ID NO: 2737 - RNA, 19 nt, Artificial Sequence
  Description of Artificial Sequence: Synthetic oligonucleotide
uuuuguaucacauuauaaa

SEQ ID NO: 2738 - RNA, 19 nt, Artificial Sequence
  Description of Artificial Sequence: Synthetic oligonucleotide
uuuguaucacauuauaaau

SEQ ID NO: 2739 - RNA, 19 nt, Artificial Sequence
  Description of Artificial Sequence: Synthetic oligonucleotide
uuguaucacauuauaaauc

SEQ ID NO: 2740 - RNA, 19 nt, Artificial Sequence
  Description of Artificial Sequence: Synthetic oligonucleotide
uguaucacauuauaaaucc

SEQ ID NO: 2741 - RNA, 19 nt, Artificial Sequence
  Description of Artificial Sequence: Synthetic oligonucleotide
guaucacauuauaaauccc

SEQ ID NO: 2742 - RNA, 19 nt, Artificial Sequence
  Description of Artificial Sequence: Synthetic oligonucleotide
uaucacauuauaaauccca

SEQ ID NO: 2743 - RNA, 19 nt, Artificial Sequence
  Description of Artificial Sequence: Synthetic oligonucleotide
aucacauuauaaaucccac

SEQ ID NO: 2744 - RNA, 19 nt, Artificial Sequence
  Description of Artificial Sequence: Synthetic oligonucleotide
ucacauuauaaaucccacu

SEQ ID NO: 2745 - RNA, 19 nt, Artificial Sequence
  Description of Artificial Sequence: Synthetic oligonucleotide
cacauuauaaaucccacuc

SEQ ID NO: 2746 - RNA, 19 nt, Artificial Sequence
  Description of Artificial Sequence: Synthetic oligonucleotide
acauuauaaaucccacucg

SEQ ID NO: 2747 - RNA, 19 nt, Artificial Sequence
  Description of Artificial Sequence: Synthetic oligonucleotide
cauuauaaaucccacucgc

SEQ ID NO: 2748 - RNA, 19 nt, Artificial Sequence
  Description of Artificial Sequence: Synthetic oligonucleotide
auuauaaaucccacucgcu

SEQ ID NO: 2749 - RNA, 19 nt, Artificial Sequence
  Description of Artificial Sequence: Synthetic oligonucleotide
uuauaaaucccacucgcuc

SEQ ID NO: 2750 - RNA, 19 nt, Artificial Sequence
  Description of Artificial Sequence: Synthetic oligonucleotide
uauaaaucccacucgcucu

SEQ ID NO: 2751 - RNA, 19 nt, Artificial Sequence
  Description of Artificial Sequence: Synthetic oligonucleotide
auaaaucccacucgcucuu

SEQ ID NO: 2752 - RNA, 19 nt, Artificial Sequence
  Description of Artificial Sequence: Synthetic oligonucleotide
uaaaucccacucgcucuuu

SEQ ID NO: 2753 - RNA, 19 nt, Artificial Sequence
  Description of Artificial Sequence: Synthetic oligonucleotide
aaaucccacucgcucuuuu

SEQ ID NO: 2754 - RNA, 19 nt, Artificial Sequence
  Description of Artificial Sequence: Synthetic oligonucleotide
aaucccacucgcucuuuuu

SEQ ID NO: 2755 - RNA, 19 nt, Artificial Sequence
  Description of Artificial Sequence: Synthetic oligonucleotide
aucccacucgcucuuuuug

SEQ ID NO: 2756 - RNA, 19 nt, Artificial Sequence
  Description of Artificial Sequence: Synthetic oligonucleotide
ucccacucgcucuuuuuga

SEQ ID NO: 2757 - RNA, 19 nt, Artificial Sequence
  Description of Artificial Sequence: Synthetic oligonucleotide
cccacucgcucuuuuugau

SEQ ID NO: 2758 - RNA, 19 nt, Artificial Sequence
  Description of Artificial Sequence: Synthetic oligonucleotide
ccacucgcucuuuuugaug

SEQ ID NO: 2759 - RNA, 19 nt, Artificial Sequence
  Description of Artificial Sequence: Synthetic oligonucleotide
cacucgcucuuuuugaugg

SEQ ID NO: 2760 - RNA, 19 nt, Artificial Sequence
  Description of Artificial Sequence: Synthetic oligonucleotide
acucgcucuuuuugauggc

SEQ ID NO: 2761 - RNA, 19 nt, Artificial Sequence
  Description of Artificial Sequence: Synthetic oligonucleotide
cucgcucuuuuugauggcc

SEQ ID NO: 2762 - RNA, 19 nt, Artificial Sequence
  Description of Artificial Sequence: Synthetic oligonucleotide
ucgcucuuuuugauggcca

SEQ ID NO: 2763 - RNA, 19 nt, Artificial Sequence
  Description of Artificial Sequence: Synthetic oligonucleotide
cgcucuuuuugauggccac

SEQ ID NO: 2764 - RNA, 19 nt, Artificial Sequence
  Description of Artificial Sequence: Synthetic oligonucleotide
gcucuuuuugauggccaca

SEQ ID NO: 2765 - RNA, 19 nt, Artificial Sequence
  Description of Artificial Sequence: Synthetic oligonucleotide
cucuuuuugauggccacau

SEQ ID NO: 2766 - RNA, 19 nt, Artificial Sequence
  Description of Artificial Sequence: Synthetic oligonucleotide
ucuuuuugauggccacaua

SEQ ID NO: 2767 - RNA, 19 nt, Artificial Sequence
  Description of Artificial Sequence: Synthetic oligonucleotide
cuuuuugauggccacauaa

SEQ ID NO: 2768 - RNA, 19 nt, Artificial Sequence
  Description of Artificial Sequence: Synthetic oligonucleotide
uuuuugauggccacauaau

SEQ ID NO: 2769 - RNA, 19 nt, Artificial Sequence
  Description of Artificial Sequence: Synthetic oligonucleotide
uuuugauggccacauaaua

SEQ ID NO: 2770 - RNA, 19 nt, Artificial Sequence
  Description of Artificial Sequence: Synthetic oligonucleotide
uuugauggccacauaauaa

SEQ ID NO: 2771 - RNA, 19 nt, Artificial Sequence
  Description of Artificial Sequence: Synthetic oligonucleotide
uugauggccacauaauaac

SEQ ID NO: 2772 - RNA, 19 nt, Artificial Sequence
  Description of Artificial Sequence: Synthetic oligonucleotide
ugauggccacauaauaacu

SEQ ID NO: 2773 - RNA, 19 nt, Artificial Sequence
  Description of Artificial Sequence: Synthetic oligonucleotide
gauggccacauaauaacua

SEQ ID NO: 2774 - RNA, 19 nt, Artificial Sequence
  Description of Artificial Sequence: Synthetic oligonucleotide
auggccacauaauaacuac

SEQ ID NO: 2775 - RNA, 19 nt, Artificial Sequence
  Description of Artificial Sequence: Synthetic oligonucleotide
uggccacauaauaacuacu

SEQ ID NO: 2776 - RNA, 19 nt, Artificial Sequence
  Description of Artificial Sequence: Synthetic oligonucleotide
ggccacauaauaacuacug

SEQ ID NO: 2777 - RNA, 19 nt, Artificial Sequence
  Description of Artificial Sequence: Synthetic oligonucleotide
gccacauaauaacuacugc

SEQ ID NO: 2778 - RNA, 19 nt, Artificial Sequence
  Description of Artificial Sequence: Synthetic oligonucleotide
ccacauaauaacuacugca

SEQ ID NO: 2779 - RNA, 19 nt, Artificial Sequence
  Description of Artificial Sequence: Synthetic oligonucleotide
cacauaauaacuacugcau

SEQ ID NO: 2780 - RNA, 19 nt, Artificial Sequence
  Description of Artificial Sequence: Synthetic oligonucleotide
acauaauaacuacugcaua

SEQ ID NO: 2781 - RNA, 19 nt, Artificial Sequence
  Description of Artificial Sequence: Synthetic oligonucleotide
cauaauaacuacugcauaa

SEQ ID NO: 2782 - RNA, 19 nt, Artificial Sequence
  Description of Artificial Sequence: Synthetic oligonucleotide
auaauaacuacugcauaau

SEQ ID NO: 2783 - RNA, 19 nt, Artificial Sequence
  Description of Artificial Sequence: Synthetic oligonucleotide
uaauaacuacugcauaaua

SEQ ID NO: 2784 - RNA, 19 nt, Artificial Sequence
  Description of Artificial Sequence: Synthetic oligonucleotide
aauaacuacugcauaauau

SEQ ID NO: 2785 - RNA, 19 nt, Artificial Sequence
  Description of Artificial Sequence: Synthetic oligonucleotide
auaacuacugcauaauaug

SEQ ID NO: 2786 - RNA, 19 nt, Artificial Sequence
  Description of Artificial Sequence: Synthetic oligonucleotide
uaacuacugcauaauaugg

SEQ ID NO: 2787 - RNA, 19 nt, Artificial Sequence
  Description of Artificial Sequence: Synthetic oligonucleotide
aacuacugcauaauaugga

SEQ ID NO: 2788 - RNA, 19 nt, Artificial Sequence
  Description of Artificial Sequence: Synthetic oligonucleotide
acuacugcauaauauggau

SEQ ID NO: 2789 - RNA, 19 nt, Artificial Sequence
  Description of Artificial Sequence: Synthetic oligonucleotide
cuacugcauaauauggaua

SEQ ID NO: 2790 - RNA, 19 nt, Artificial Sequence
  Description of Artificial Sequence: Synthetic oligonucleotide
uacugcauaauauggauac

SEQ ID NO: 2791 - RNA, 19 nt, Artificial Sequence
  Description of Artificial Sequence: Synthetic oligonucleotide
acugcauaauauggauacg

SEQ ID NO: 2792 - RNA, 19 nt, Artificial Sequence
  Description of Artificial Sequence: Synthetic oligonucleotide
cugcauaauauggauacgc

SEQ ID NO: 2793 - RNA, 19 nt, Artificial Sequence
  Description of Artificial Sequence: Synthetic oligonucleotide
ugcauaauauggauacgcc

SEQ ID NO: 2794 - RNA, 19 nt, Artificial Sequence
  Description of Artificial Sequence: Synthetic oligonucleotide
gcauaauauggauacgccu

SEQ ID NO: 2795 - RNA, 19 nt, Artificial Sequence
  Description of Artificial Sequence: Synthetic oligonucleotide
cauaauauggauacgccuu

SEQ ID NO: 2796 - RNA, 19 nt, Artificial Sequence
  Description of Artificial Sequence: Synthetic oligonucleotide
auaauauggauacgccuua

SEQ ID NO: 2797 - RNA, 19 nt, Artificial Sequence
  Description of Artificial Sequence: Synthetic oligonucleotide
uaauauggauacgccuuau

SEQ ID NO: 2798 - RNA, 19 nt, Artificial Sequence
  Description of Artificial Sequence: Synthetic oligonucleotide
aauauggauacgccuuauu

SEQ ID NO: 2799 - RNA, 19 nt, Artificial Sequence
  Description of Artificial Sequence: Synthetic oligonucleotide
auauggauacgccuuauuu

SEQ ID NO: 2800 - RNA, 19 nt, Artificial Sequence
  Description of Artificial Sequence: Synthetic oligonucleotide
uauggauacgccuuauuug

SEQ ID NO: 2801 - RNA, 19 nt, Artificial Sequence
  Description of Artificial Sequence: Synthetic oligonucleotide
auggauacgccuuauuuga

SEQ ID NO: 2802 - RNA, 19 nt, Artificial Sequence
  Description of Artificial Sequence: Synthetic oligonucleotide
uggauacgccuuauuugau

SEQ ID NO: 2803 - RNA, 19 nt, Artificial Sequence
  Description of Artificial Sequence: Synthetic oligonucleotide
ggauacgccuuauuugauu

SEQ ID NO: 2804 - RNA, 19 nt, Artificial Sequence
  Description of Artificial Sequence: Synthetic oligonucleotide
gauacgccuuauuugauuu

SEQ ID NO: 2805 - RNA, 19 nt, Artificial Sequence
  Description of Artificial Sequence: Synthetic oligonucleotide
auacgccuuauuugauuua

SEQ ID NO: 2806 - RNA, 19 nt, Artificial Sequence
  Description of Artificial Sequence: Synthetic oligonucleotide
uacgccuuauuugauuuaa

SEQ ID NO: 2807 - RNA, 19 nt, Artificial Sequence
  Description of Artificial Sequence: Synthetic oligonucleotide
acgccuuauuugauuuaac

SEQ ID NO: 2808 - RNA, 19 nt, Artificial Sequence
  Description of Artificial Sequence: Synthetic oligonucleotide
cgccuuauuugauuuaacu

SEQ ID NO: 2809 - RNA, 19 nt, Artificial Sequence
  Description of Artificial Sequence: Synthetic oligonucleotide
gccuuauuugauuuaacua

SEQ ID NO: 2810 - RNA, 19 nt, Artificial Sequence
  Description of Artificial Sequence: Synthetic oligonucleotide
ccuuauuugauuuaacuag

SEQ ID NO: 2811 - RNA, 19 nt, Artificial Sequence
  Description of Artificial Sequence: Synthetic oligonucleotide
cuuauuugauuuaacuagu

SEQ ID NO: 2812 - RNA, 19 nt, Artificial Sequence
  Description of Artificial Sequence: Synthetic oligonucleotide
uuauuugauuuaacuaguu

SEQ ID NO: 2813 - RNA, 19 nt, Artificial Sequence
  Description of Artificial Sequence: Synthetic oligonucleotide
uauuugauuuaacuaguuc

SEQ ID NO: 2814 - RNA, 19 nt, Artificial Sequence
  Description of Artificial Sequence: Synthetic oligonucleotide
auuugauuuaacuaguucc

SEQ ID NO: 2815 - RNA, 19 nt, Artificial Sequence
  Description of Artificial Sequence: Synthetic oligonucleotide
uuugauuuaacuaguuccc

SEQ ID NO: 2816 - RNA, 19 nt, Artificial Sequence
  Description of Artificial Sequence: Synthetic oligonucleotide
uugauuuaacuaguucccu

SEQ ID NO: 2817 - RNA, 19 nt, Artificial Sequence
  Description of Artificial Sequence: Synthetic oligonucleotide
ugauuuaacuaguucccua

SEQ ID NO: 2818 - RNA, 19 nt, Artificial Sequence
  Description of Artificial Sequence: Synthetic oligonucleotide
gauuuaacuaguucccuaa

SEQ ID NO: 2819 - RNA, 19 nt, Artificial Sequence
  Description of Artificial Sequence: Synthetic oligonucleotide
auuuaacuaguucccuaau

SEQ ID NO: 2820 - RNA, 19 nt, Artificial Sequence
  Description of Artificial Sequence: Synthetic oligonucleotide
uuuaacuaguucccuaaug

SEQ ID NO: 2821 - RNA, 19 nt, Artificial Sequence
  Description of Artificial Sequence: Synthetic oligonucleotide
uuaacuaguucccuaauga

SEQ ID NO: 2822 - RNA, 19 nt, Artificial Sequence
  Description of Artificial Sequence: Synthetic oligonucleotide
uaacuaguucccuaaugau

SEQ ID NO: 2823 - RNA, 19 nt, Artificial Sequence
  Description of Artificial Sequence: Synthetic oligonucleotide
aacuaguucccuaaugaug

SEQ ID NO: 2824 - RNA, 19 nt, Artificial Sequence
  Description of Artificial Sequence: Synthetic oligonucleotide
acuaguucccuaaugaugg

SEQ ID NO: 2825 - RNA, 19 nt, Artificial Sequence
  Description of Artificial Sequence: Synthetic oligonucleotide
cuaguucccuaaugaugga

SEQ ID NO: 2826 - RNA, 19 nt, Artificial Sequence
  Description of Artificial Sequence: Synthetic oligonucleotide
uaguucccuaaugauggac

SEQ ID NO: 2827 - RNA, 19 nt, Artificial Sequence
  Description of Artificial Sequence: Synthetic oligonucleotide
aguucccuaaugauggacu

SEQ ID NO: 2828 - RNA, 19 nt, Artificial Sequence
  Description of Artificial Sequence: Synthetic oligonucleotide
guucccuaaugauggacuu

SEQ ID NO: 2829 - RNA, 19 nt, Artificial Sequence
  Description of Artificial Sequence: Synthetic oligonucleotide
uucccuaaugauggacuuu

SEQ ID NO: 2830 - RNA, 19 nt, Artificial Sequence
  Description of Artificial Sequence: Synthetic oligonucleotide
ucccuaaugauggacuuuu

SEQ ID NO: 2831 - RNA, 19 nt, Artificial Sequence
  Description of Artificial Sequence: Synthetic oligonucleotide
cccuaaugauggacuuuua

SEQ ID NO: 2832 - RNA, 19 nt, Artificial Sequence
  Description of Artificial Sequence: Synthetic oligonucleotide
ccuaaugauggacuuuuaa

SEQ ID NO: 2833 - RNA, 19 nt, Artificial Sequence
  Description of Artificial Sequence: Synthetic oligonucleotide
cuaaugauggacuuuuaag

SEQ ID NO: 2834 - RNA, 19 nt, Artificial Sequence
  Description of Artificial Sequence: Synthetic oligonucleotide
uaaugauggacuuuuaagu

SEQ ID NO: 2835 - RNA, 19 nt, Artificial Sequence
  Description of Artificial Sequence: Synthetic oligonucleotide
aaugauggacuuuuaaguu

SEQ ID NO: 2836 - RNA, 19 nt, Artificial Sequence
  Description of Artificial Sequence: Synthetic oligonucleotide
augauggacuuuuaaguug

SEQ ID NO: 2837 - RNA, 19 nt, Artificial Sequence
  Description of Artificial Sequence: Synthetic oligonucleotide
ugauggacuuuuaaguugu

SEQ ID NO: 2838 - RNA, 19 nt, Artificial Sequence
  Description of Artificial Sequence: Synthetic oligonucleotide
gauggacuuuuaaguuguu

SEQ ID NO: 2839 - RNA, 19 nt, Artificial Sequence
  Description of Artificial Sequence: Synthetic oligonucleotide
auggacuuuuaaguuguuu

SEQ ID NO: 2840 - RNA, 19 nt, Artificial Sequence
  Description of Artificial Sequence: Synthetic oligonucleotide
uggacuuuuaaguuguuuc

SEQ ID NO: 2841 - RNA, 19 nt, Artificial Sequence
  Description of Artificial Sequence: Synthetic oligonucleotide
ggacuuuuaaguuguuucc

SEQ ID NO: 2842 - RNA, 19 nt, Artificial Sequence
  Description of Artificial Sequence: Synthetic oligonucleotide
gacuuuuaaguuguuuccu

SEQ ID NO: 2843 - RNA, 19 nt, Artificial Sequence
  Description of Artificial Sequence: Synthetic oligonucleotide
acuuuuaaguuguuuccuu

SEQ ID NO: 2844 - RNA, 19 nt, Artificial Sequence
  Description of Artificial Sequence: Synthetic oligonucleotide
cuuuuaaguuguuuccuuu

SEQ ID NO: 2845 - RNA, 19 nt, Artificial Sequence
  Description of Artificial Sequence: Synthetic oligonucleotide
uuuuaaguuguuuccuuuu

SEQ ID NO: 2846 - RNA, 19 nt, Artificial Sequence
  Description of Artificial Sequence: Synthetic oligonucleotide
uuuaaguuguuuccuuuuu

SEQ ID NO: 2847 - RNA, 19 nt, Artificial Sequence
  Description of Artificial Sequence: Synthetic oligonucleotide
uuaaguuguuuccuuuuuu

SEQ ID NO: 2848 - RNA, 19 nt, Artificial Sequence
  Description of Artificial Sequence: Synthetic oligonucleotide
uaaguuguuuccuuuuuuu

SEQ ID NO: 2849 - RNA, 19 nt, Artificial Sequence
  Description of Artificial Sequence: Synthetic oligonucleotide
aaguuguuuccuuuuuuuu

SEQ ID NO: 2850 - RNA, 19 nt, Artificial Sequence
  Description of Artificial Sequence: Synthetic oligonucleotide
aguuguuuccuuuuuuuuu

SEQ ID NO: 2851 - RNA, 19 nt, Artificial Sequence
  Description of Artificial Sequence: Synthetic oligonucleotide
guuguuuccuuuuuuuuuc

SEQ ID NO: 2852 - RNA, 19 nt, Artificial Sequence
  Description of Artificial Sequence: Synthetic oligonucleotide
uuguuuccuuuuuuuuucu

SEQ ID NO: 2853 - RNA, 19 nt, Artificial Sequence
  Description of Artificial Sequence: Synthetic oligonucleotide
uguuuccuuuuuuuuucuu

SEQ ID NO: 2854 - RNA, 19 nt, Artificial Sequence
  Description of Artificial Sequence: Synthetic oligonucleotide
guuuccuuuuuuuuucuuu

SEQ ID NO: 2855 - RNA, 19 nt, Artificial Sequence
  Description of Artificial Sequence: Synthetic oligonucleotide
uuuccuuuuuuuuucuuuu

SEQ ID NO: 2856 - RNA, 19 nt, Artificial Sequence
  Description of Artificial Sequence: Synthetic oligonucleotide
uuccuuuuuuuuucuuuuu

SEQ ID NO: 2857 - RNA, 19 nt, Artificial Sequence
  Description of Artificial Sequence: Synthetic oligonucleotide
uccuuuuuuuuucuuuuuu

SEQ ID NO: 2858 - RNA, 19 nt, Artificial Sequence
  Description of Artificial Sequence: Synthetic oligonucleotide
ccuuuuuuuuucuuuuuug

SEQ ID NO: 2859 - RNA, 19 nt, Artificial Sequence
  Description of Artificial Sequence: Synthetic oligonucleotide
cuuuuuuuuucuuuuuugc

SEQ ID NO: 2860 - RNA, 19 nt, Artificial Sequence
  Description of Artificial Sequence: Synthetic oligonucleotide
uuuuuuuuucuuuuuugcu

SEQ ID NO: 2861 - RNA, 19 nt, Artificial Sequence
  Description of Artificial Sequence: Synthetic oligonucleotide
uuuuuuuucuuuuuugcua

SEQ ID NO: 2862 - RNA, 19 nt, Artificial Sequence
  Description of Artificial Sequence: Synthetic oligonucleotide
uuuuuuucuuuuuugcuac

SEQ ID NO: 2863 - RNA, 19 nt, Artificial Sequence
  Description of Artificial Sequence: Synthetic oligonucleotide
uuuuuucuuuuuugcuacu

SEQ ID NO: 2864 - RNA, 19 nt, Artificial Sequence
  Description of Artificial Sequence: Synthetic oligonucleotide
uuuuucuuuuuugcuacug

SEQ ID NO: 2865 - RNA, 19 nt, Artificial Sequence
  Description of Artificial Sequence: Synthetic oligonucleotide
uuuucuuuuuugcuacugc

SEQ ID NO: 2866 - RNA, 19 nt, Artificial Sequence
  Description of Artificial Sequence: Synthetic oligonucleotide
uuucuuuuuugcuacugca

SEQ ID NO: 2867 - RNA, 19 nt, Artificial Sequence
  Description of Artificial Sequence: Synthetic oligonucleotide
uucuuuuuugcuacugcaa

SEQ ID NO: 2868 - RNA, 19 nt, Artificial Sequence
  Description of Artificial Sequence: Synthetic oligonucleotide
ucuuuuuugcuacugcaaa

SEQ ID NO: 2869 - RNA, 19 nt, Artificial Sequence
  Description of Artificial Sequence: Synthetic oligonucleotide
cuuuuuugcuacugcaaac

SEQ ID NO: 2870 - RNA, 19 nt, Artificial Sequence
  Description of Artificial Sequence: Synthetic oligonucleotide
uuuuuugcuacugcaaacg

SEQ ID NO: 2871 - RNA, 19 nt, Artificial Sequence
  Description of Artificial Sequence: Synthetic oligonucleotide
uuuuugcuacugcaaacga

SEQ ID NO: 2872 - RNA, 19 nt, Artificial Sequence
  Description of Artificial Sequence: Synthetic oligonucleotide
uuuugcuacugcaaacgau

SEQ ID NO: 2873 - RNA, 19 nt, Artificial Sequence
  Description of Artificial Sequence: Synthetic oligonucleotide
uuugcuacugcaaacgaug

SEQ ID NO: 2874 - RNA, 19 nt, Artificial Sequence
  Description of Artificial Sequence: Synthetic oligonucleotide
uugcuacugcaaacgaugc

SEQ ID NO: 2875 - RNA, 19 nt, Artificial Sequence
  Description of Artificial Sequence: Synthetic oligonucleotide
ugcuacugcaaacgaugcu

SEQ ID NO: 2876 - RNA, 19 nt, Artificial Sequence
  Description of Artificial Sequence: Synthetic oligonucleotide
gcuacugcaaacgaugcua

SEQ ID NO: 2877 - RNA, 19 nt, Artificial Sequence
  Description of Artificial Sequence: Synthetic oligonucleotide
cuacugcaaacgaugcuau

SEQ ID NO: 2878 - RNA, 19 nt, Artificial Sequence
  Description of Artificial Sequence: Synthetic oligonucleotide
uacugcaaacgaugcuaua

SEQ ID NO: 2879 - RNA, 19 nt, Artificial Sequence
  Description of Artificial Sequence: Synthetic oligonucleotide
acugcaaacgaugcuauaa

SEQ ID NO: 2880 - RNA, 19 nt, Artificial Sequence
  Description of Artificial Sequence: Synthetic oligonucleotide
cugcaaacgaugcuauaau

SEQ ID NO: 2881 - RNA, 19 nt, Artificial Sequence
  Description of Artificial Sequence: Synthetic oligonucleotide
ugcaaacgaugcuauaaua

SEQ ID NO: 2882 - RNA, 19 nt, Artificial Sequence
  Description of Artificial Sequence: Synthetic oligonucleotide
gcaaacgaugcuauaauaa

SEQ ID NO: 2883 - RNA, 19 nt, Artificial Sequence
  Description of Artificial Sequence: Synthetic oligonucleotide
caaacgaugcuauaauaaa

SEQ ID NO: 2884 - RNA, 19 nt, Artificial Sequence
  Description of Artificial Sequence: Synthetic oligonucleotide
aaacgaugcuauaauaaau

SEQ ID NO: 2885 - RNA, 19 nt, Artificial Sequence
  Description of Artificial Sequence: Synthetic oligonucleotide
aacgaugcuauaauaaaug

SEQ ID NO: 2886 - RNA, 19 nt, Artificial Sequence
  Description of Artificial Sequence: Synthetic oligonucleotide
acgaugcuauaauaaaugu

SEQ ID NO: 2887 - RNA, 19 nt, Artificial Sequence
  Description of Artificial Sequence: Synthetic oligonucleotide
cgaugcuauaauaaauguc

SEQ ID NO: 2888 - RNA, 19 nt, Artificial Sequence
  Description of Artificial Sequence: Synthetic oligonucleotide
gaugcuauaauaaaugucc

SEQ ID NO: 2889 - RNA, 19 nt, Artificial Sequence
  Description of Artificial Sequence: Synthetic oligonucleotide
augcuauaauaaauguccu

SEQ ID NO: 2890 - RNA, 19 nt, Artificial Sequence
  Description of Artificial Sequence: Synthetic oligonucleotide
ugcuauaauaaauguccuu

SEQ ID NO: 2891 - RNA, 19 nt, Artificial Sequence
  Description of Artificial Sequence: Synthetic oligonucleotide
gcuauaauaaauguccuua

SEQ ID NO: 2892 - RNA, 19 nt, Artificial Sequence
  Description of Artificial Sequence: Synthetic oligonucleotide
cuauaauaaauguccuuau

SEQ ID NO: 2893 - RNA, 19 nt, Artificial Sequence
  Description of Artificial Sequence: Synthetic oligonucleotide
uauaauaaauguccuuauc

SEQ ID NO: 2894 - RNA, 19 nt, Artificial Sequence
  Description of Artificial Sequence: Synthetic oligonucleotide
auaauaaauguccuuauca

SEQ ID NO: 2895 - RNA, 19 nt, Artificial Sequence
  Description of Artificial Sequence: Synthetic oligonucleotide
uaauaaauguccuuaucaa

SEQ ID NO: 2896 - RNA, 19 nt, Artificial Sequence
  Description of Artificial Sequence: Synthetic oligonucleotide
aauaaauguccuuaucaaa

SEQ ID NO: 2897 - RNA, 19 nt, Artificial Sequence
  Description of Artificial Sequence: Synthetic oligonucleotide
auaaauguccuuaucaaaa

SEQ ID NO: 2898 - RNA, 19 nt, Artificial Sequence
  Description of Artificial Sequence: Synthetic oligonucleotide
uaaauguccuuaucaaaaa

SEQ ID NO: 2899 - RNA, 19 nt, Artificial Sequence
  Description of Artificial Sequence: Synthetic oligonucleotide
agagcccaggcugcagagu

SEQ ID NO: 2900 - RNA, 19 nt, Artificial Sequence
  Description of Artificial Sequence: Synthetic oligonucleotide
cagagcccaggcugcagag

SEQ ID NO: 2901 - RNA, 19 nt, Artificial Sequence
  Description of Artificial Sequence: Synthetic oligonucleotide
acagagcccaggcugcaga

SEQ ID NO: 2902 - RNA, 19 nt, Artificial Sequence
  Description of Artificial Sequence: Synthetic oligonucleotide
cacagagcccaggcugcag

SEQ ID NO: 2903 - RNA, 19 nt, Artificial Sequence
  Description of Artificial Sequence: Synthetic oligonucleotide
ucacagagcccaggcugca

SEQ ID NO: 2904 - RNA, 19 nt, Artificial Sequence
  Description of Artificial Sequence: Synthetic oligonucleotide
cucacagagcccaggcugc

SEQ ID NO: 2905 - RNA, 19 nt, Artificial Sequence
  Description of Artificial Sequence: Synthetic oligonucleotide
ucucacagagcccaggcug

SEQ ID NO: 2906 - RNA, 19 nt, Artificial Sequence
  Description of Artificial Sequence: Synthetic oligonucleotide
gucucacagagcccaggcu

SEQ ID NO: 2907 - RNA, 19 nt, Artificial Sequence
  Description of Artificial Sequence: Synthetic oligonucleotide
agucucacagagcccaggc

SEQ ID NO: 2908 - RNA, 19 nt, Artificial Sequence
  Description of Artificial Sequence: Synthetic oligonucleotide
cagucucacagagcccagg

SEQ ID NO: 2909 - RNA, 19 nt, Artificial Sequence
  Description of Artificial Sequence: Synthetic oligonucleotide
ucagucucacagagcccag

SEQ ID NO: 2910 - RNA, 19 nt, Artificial Sequence
  Description of Artificial Sequence: Synthetic oligonucleotide
cucagucucacagagccca

SEQ ID NO: 2911 - RNA, 19 nt, Artificial Sequence
  Description of Artificial Sequence: Synthetic oligonucleotide
ccucagucucacagagccc

SEQ ID NO: 2912 - RNA, 19 nt, Artificial Sequence
  Description of Artificial Sequence: Synthetic oligonucleotide
accucagucucacagagcc

SEQ ID NO: 2913 - RNA, 19 nt, Artificial Sequence
  Description of Artificial Sequence: Synthetic oligonucleotide
caccucagucucacagagc

SEQ ID NO: 2914 - RNA, 19 nt, Artificial Sequence
  Description of Artificial Sequence: Synthetic oligonucleotide
ccaccucagucucacagag

SEQ ID NO: 2915 - RNA, 19 nt, Artificial Sequence
  Description of Artificial Sequence: Synthetic oligonucleotide
gccaccucagucucacaga

SEQ ID NO: 2916 - RNA, 19 nt, Artificial Sequence
  Description of Artificial Sequence: Synthetic oligonucleotide
cgccaccucagucucacag

SEQ ID NO: 2917 - RNA, 19 nt, Artificial Sequence
  Description of Artificial Sequence: Synthetic oligonucleotide
ccgccaccucagucucaca

SEQ ID NO: 2918 - RNA, 19 nt, Artificial Sequence
  Description of Artificial Sequence: Synthetic oligonucleotide
accgccaccucagucucac

SEQ ID NO: 2919 - RNA, 19 nt, Artificial Sequence
  Description of Artificial Sequence: Synthetic oligonucleotide
gaccgccaccucagucuca

SEQ ID NO: 2920 - RNA, 19 nt, Artificial Sequence
  Description of Artificial Sequence: Synthetic oligonucleotide
ugaccgccaccucagucuc

SEQ ID NO: 2921 - RNA, 19 nt, Artificial Sequence
  Description of Artificial Sequence: Synthetic oligonucleotide
cugaccgccaccucagucu

SEQ ID NO: 2922 - RNA, 19 nt, Artificial Sequence
  Description of Artificial Sequence: Synthetic oligonucleotide
gcugaccgccaccucaguc

SEQ ID NO: 2923 - RNA, 19 nt, Artificial Sequence
  Description of Artificial Sequence: Synthetic oligonucleotide
ggcugaccgccaccucagu

SEQ ID NO: 2924 - RNA, 19 nt, Artificial Sequence
  Description of Artificial Sequence: Synthetic oligonucleotide
cggcugaccgccaccucag

SEQ ID NO: 2925 - RNA, 19 nt, Artificial Sequence
  Description of Artificial Sequence: Synthetic oligonucleotide
ccggcugaccgccaccuca

SEQ ID NO: 2926 - RNA, 19 nt, Artificial Sequence
  Description of Artificial Sequence: Synthetic oligonucleotide
uccggcugaccgccaccuc

SEQ ID NO: 2927 - RNA, 19 nt, Artificial Sequence
  Description of Artificial Sequence: Synthetic oligonucleotide
cuccggcugaccgccaccu

SEQ ID NO: 2928 - RNA, 19 nt, Artificial Sequence
  Description of Artificial Sequence: Synthetic oligonucleotide
acuccggcugaccgccacc

SEQ ID NO: 2929 - RNA, 19 nt, Artificial Sequence
  Description of Artificial Sequence: Synthetic oligonucleotide
cacuccggcugaccgccac

SEQ ID NO: 2930 - RNA, 19 nt, Artificial Sequence
  Description of Artificial Sequence: Synthetic oligonucleotide
ucacuccggcugaccgcca

SEQ ID NO: 2931 - RNA, 19 nt, Artificial Sequence
  Description of Artificial Sequence: Synthetic oligonucleotide
cucacuccggcugaccgcc

SEQ ID NO: 2932 - RNA, 19 nt, Artificial Sequence
  Description of Artificial Sequence: Synthetic oligonucleotide
acucacuccggcugaccgc

SEQ ID NO: 2933 - RNA, 19 nt, Artificial Sequence
  Description of Artificial Sequence: Synthetic oligonucleotide
cacucacuccggcugaccg

SEQ ID NO: 2934 - RNA, 19 nt, Artificial Sequence
  Description of Artificial Sequence: Synthetic oligonucleotide
acacucacuccggcugacc

SEQ ID NO: 2935 - RNA, 19 nt, Artificial Sequence
  Description of Artificial Sequence: Synthetic oligonucleotide
aacacucacuccggcugac

SEQ ID NO: 2936 - RNA, 19 nt, Artificial Sequence
  Description of Artificial Sequence: Synthetic oligonucleotide
caacacucacuccggcuga

SEQ ID NO: 2937 - RNA, 19 nt, Artificial Sequence
  Description of Artificial Sequence: Synthetic oligonucleotide
ccaacacucacuccggcug

SEQ ID NO: 2938 - RNA, 19 nt, Artificial Sequence
  Description of Artificial Sequence: Synthetic oligonucleotide
cccaacacucacuccggcu

SEQ ID NO: 2939 - RNA, 19 nt, Artificial Sequence
  Description of Artificial Sequence: Synthetic oligonucleotide
ccccaacacucacuccggc

SEQ ID NO: 2940 - RNA, 19 nt, Artificial Sequence
  Description of Artificial Sequence: Synthetic oligonucleotide
accccaacacucacuccgg

SEQ ID NO: 2941 - RNA, 19 nt, Artificial Sequence
  Description of Artificial Sequence: Synthetic oligonucleotide
gaccccaacacucacuccg

SEQ ID NO: 2942 - RNA, 19 nt, Artificial Sequence
  Description of Artificial Sequence: Synthetic oligonucleotide
ggaccccaacacucacucc

SEQ ID NO: 2943 - RNA, 19 nt, Artificial Sequence
  Description of Artificial Sequence: Synthetic oligonucleotide
aggaccccaacacucacuc

SEQ ID NO: 2944 - RNA, 19 nt, Artificial Sequence
  Description of Artificial Sequence: Synthetic oligonucleotide
caggaccccaacacucacu

SEQ ID NO: 2945 - RNA, 19 nt, Artificial Sequence
  Description of Artificial Sequence: Synthetic oligonucleotide
ccaggaccccaacacucac

SEQ ID NO: 2946 - RNA, 19 nt, Artificial Sequence
  Description of Artificial Sequence: Synthetic oligonucleotide
cccaggaccccaacacuca

SEQ ID NO: 2947 - RNA, 19 nt, Artificial Sequence
  Description of Artificial Sequence: Synthetic oligonucleotide
ccccaggaccccaacacuc

SEQ ID NO: 2948 - RNA, 19 nt, Artificial Sequence
  Description of Artificial Sequence: Synthetic oligonucleotide
gccccaggaccccaacacu

SEQ ID NO: 2949 - RNA, 19 nt, Artificial Sequence
  Description of Artificial Sequence: Synthetic oligonucleotide
ugccccaggaccccaacac

SEQ ID NO: 2950 - RNA, 19 nt, Artificial Sequence
  Description of Artificial Sequence: Synthetic oligonucleotide
gugccccaggaccccaaca

SEQ ID NO: 2951 - RNA, 19 nt, Artificial Sequence
  Description of Artificial Sequence: Synthetic oligonucleotide
ggugccccaggaccccaac

SEQ ID NO: 2952 - RNA, 19 nt, Artificial Sequence
  Description of Artificial Sequence: Synthetic oligonucleotide
aggugccccaggaccccaa

SEQ ID NO: 2953 - RNA, 19 nt, Artificial Sequence
  Description of Artificial Sequence: Synthetic oligonucleotide
caggugccccaggacccca

SEQ ID NO: 2954 - RNA, 19 nt, Artificial Sequence
  Description of Artificial Sequence: Synthetic oligonucleotide
gcaggugccccaggacccc

SEQ ID NO: 2955 - RNA, 19 nt, Artificial Sequence
  Description of Artificial Sequence: Synthetic oligonucleotide
ggcaggugccccaggaccc

SEQ ID NO: 2956 - RNA, 19 nt, Artificial Sequence
  Description of Artificial Sequence: Synthetic oligonucleotide
aggcaggugccccaggacc

SEQ ID NO: 2957 - RNA, 19 nt, Artificial Sequence
  Description of Artificial Sequence: Synthetic oligonucleotide
aaggcaggugccccaggac

SEQ ID NO: 2958 - RNA, 19 nt, Artificial Sequence
  Description of Artificial Sequence: Synthetic oligonucleotide
uaaggcaggugccccagga

SEQ ID NO: 2959 - RNA, 19 nt, Artificial Sequence
  Description of Artificial Sequence: Synthetic oligonucleotide
guaaggcaggugccccagg

SEQ ID NO: 2960 - RNA, 19 nt, Artificial Sequence
  Description of Artificial Sequence: Synthetic oligonucleotide
uguaaggcaggugccccag

SEQ ID NO: 2961 - RNA, 19 nt, Artificial Sequence
  Description of Artificial Sequence: Synthetic oligonucleotide
auguaaggcaggugcccca

SEQ ID NO: 2962 - RNA, 19 nt, Artificial Sequence
  Description of Artificial Sequence: Synthetic oligonucleotide
cauguaaggcaggugcccc

SEQ ID NO: 2963 - RNA, 19 nt, Artificial Sequence
  Description of Artificial Sequence: Synthetic oligonucleotide
ccauguaaggcaggugccc

SEQ ID NO: 2964 - RNA, 19 nt, Artificial Sequence
  Description of Artificial Sequence: Synthetic oligonucleotide
gccauguaaggcaggugcc

SEQ ID NO: 2965 - RNA, 19 nt, Artificial Sequence
  Description of Artificial Sequence: Synthetic oligonucleotide
agccauguaaggcaggugc

SEQ ID NO: 2966 - RNA, 19 nt, Artificial Sequence
  Description of Artificial Sequence: Synthetic oligonucleotide
aagccauguaaggcaggug

SEQ ID NO: 2967 - RNA, 19 nt, Artificial Sequence
  Description of Artificial Sequence: Synthetic oligonucleotide
caagccauguaaggcaggu

SEQ ID NO: 2968 - RNA, 19 nt, Artificial Sequence
  Description of Artificial Sequence: Synthetic oligonucleotide
acaagccauguaaggcagg

SEQ ID NO: 2969 - RNA, 19 nt, Artificial Sequence
  Description of Artificial Sequence: Synthetic oligonucleotide
aacaagccauguaaggcag

SEQ ID NO: 2970 - RNA, 19 nt, Artificial Sequence
  Description of Artificial Sequence: Synthetic oligonucleotide
aaacaagccauguaaggca

SEQ ID NO: 2971 - RNA, 19 nt, Artificial Sequence
  Description of Artificial Sequence: Synthetic oligonucleotide
uaaacaagccauguaaggc

SEQ ID NO: 2972 - RNA, 19 nt, Artificial Sequence
  Description of Artificial Sequence: Synthetic oligonucleotide
auaaacaagccauguaagg

SEQ ID NO: 2973 - RNA, 19 nt, Artificial Sequence
  Description of Artificial Sequence: Synthetic oligonucleotide
cauaaacaagccauguaag

SEQ ID NO: 2974 - RNA, 19 nt, Artificial Sequence
  Description of Artificial Sequence: Synthetic oligonucleotide
ucauaaacaagccauguaa

SEQ ID NO: 2975 - RNA, 19 nt, Artificial Sequence
  Description of Artificial Sequence: Synthetic oligonucleotide
uucauaaacaagccaugua

SEQ ID NO: 2976 - RNA, 19 nt, Artificial Sequence
  Description of Artificial Sequence: Synthetic oligonucleotide
guucauaaacaagccaugu

SEQ ID NO: 2977 - RNA, 19 nt, Artificial Sequence
  Description of Artificial Sequence: Synthetic oligonucleotide
uguucauaaacaagccaug

SEQ ID NO: 2978 - RNA, 19 nt, Artificial Sequence
  Description of Artificial Sequence: Synthetic oligonucleotide
auguucauaaacaagccau

SEQ ID NO: 2979 - RNA, 19 nt, Artificial Sequence
  Description of Artificial Sequence: Synthetic oligonucleotide
aauguucauaaacaagcca

SEQ ID NO: 2980 - RNA, 19 nt, Artificial Sequence
  Description of Artificial Sequence: Synthetic oligonucleotide
uaauguucauaaacaagcc

SEQ ID NO: 2981 - RNA, 19 nt, Artificial Sequence
  Description of Artificial Sequence: Synthetic oligonucleotide
uuaauguucauaaacaagc

SEQ ID NO: 2982 - RNA, 19 nt, Artificial Sequence
  Description of Artificial Sequence: Synthetic oligonucleotide
uuuaauguucauaaacaag

SEQ ID NO: 2983 - RNA, 19 nt, Artificial Sequence
  Description of Artificial Sequence: Synthetic oligonucleotide
cuuuaauguucauaaacaa

SEQ ID NO: 2984 - RNA, 19 nt, Artificial Sequence
  Description of Artificial Sequence: Synthetic oligonucleotide
ccuuuaauguucauaaaca

SEQ ID NO: 2985 - RNA, 19 nt, Artificial Sequence
  Description of Artificial Sequence: Synthetic oligonucleotide
cccuuuaauguucauaaac

SEQ ID NO: 2986 - RNA, 19 nt, Artificial Sequence
  Description of Artificial Sequence: Synthetic oligonucleotide
ucccuuuaauguucauaaa

SEQ ID NO: 2987 - RNA, 19 nt, Artificial Sequence
  Description of Artificial Sequence: Synthetic oligonucleotide
uucccuuuaauguucauaa

SEQ ID NO: 2988 - RNA, 19 nt, Artificial Sequence
  Description of Artificial Sequence: Synthetic oligonucleotide
cuucccuuuaauguucaua

SEQ ID NO: 2989 - RNA, 19 nt, Artificial Sequence
  Description of Artificial Sequence: Synthetic oligonucleotide
ucuucccuuuaauguucau

SEQ ID NO: 2990 - RNA, 19 nt, Artificial Sequence
  Description of Artificial Sequence: Synthetic oligonucleotide
uucuucccuuuaauguuca

SEQ ID NO: 2991 - RNA, 19 nt, Artificial Sequence
  Description of Artificial Sequence: Synthetic oligonucleotide
cuucuucccuuuaauguuc

SEQ ID NO: 2992 - RNA, 19 nt, Artificial Sequence
  Description of Artificial Sequence: Synthetic oligonucleotide
acuucuucccuuuaauguu

SEQ ID NO: 2993 - RNA, 19 nt, Artificial Sequence
  Description of Artificial Sequence: Synthetic oligonucleotide
aacuucuucccuuuaaugu

SEQ ID NO: 2994 - RNA, 19 nt, Artificial Sequence
  Description of Artificial Sequence: Synthetic oligonucleotide
caacuucuucccuuuaaug

SEQ ID NO: 2995 - RNA, 19 nt, Artificial Sequence
  Description of Artificial Sequence: Synthetic oligonucleotide
ucaacuucuucccuuuaau

SEQ ID NO: 2996 - RNA, 19 nt, Artificial Sequence
  Description of Artificial Sequence: Synthetic oligonucleotide
uucaacuucuucccuuuaa

SEQ ID NO: 2997 - RNA, 19 nt, Artificial Sequence
  Description of Artificial Sequence: Synthetic oligonucleotide
cuucaacuucuucccuuua

SEQ ID NO: 2998 - RNA, 19 nt, Artificial Sequence
  Description of Artificial Sequence: Synthetic oligonucleotide
gcuucaacuucuucccuuu

SEQ ID NO: 2999 - RNA, 19 nt, Artificial Sequence
  Description of Artificial Sequence: Synthetic oligonucleotide
agcuucaacuucuucccuu

SEQ ID NO: 3000 - RNA, 19 nt, Artificial Sequence
  Description of Artificial Sequence: Synthetic oligonucleotide
aagcuucaacuucuucccu

SEQ ID NO: 3001 - RNA, 19 nt, Artificial Sequence
  Description of Artificial Sequence: Synthetic oligonucleotide
caagcuucaacuucuuccc

SEQ ID NO: 3002 - RNA, 19 nt, Artificial Sequence
  Description of Artificial Sequence: Synthetic oligonucleotide
ucaagcuucaacuucuucc

SEQ ID NO: 3003 - RNA, 19 nt, Artificial Sequence
  Description of Artificial Sequence: Synthetic oligonucleotide
cucaagcuucaacuucuuc

SEQ ID NO: 3004 - RNA, 19 nt, Artificial Sequence
  Description of Artificial Sequence: Synthetic oligonucleotide
ccucaagcuucaacuucuu

SEQ ID NO: 3005 - RNA, 19 nt, Artificial Sequence
  Description of Artificial Sequence: Synthetic oligonucleotide
uccucaagcuucaacuucu

SEQ ID NO: 3006 - RNA, 19 nt, Artificial Sequence
  Description of Artificial Sequence: Synthetic oligonucleotide
cuccucaagcuucaacuuc

SEQ ID NO: 3007 - RNA, 19 nt, Artificial Sequence
  Description of Artificial Sequence: Synthetic oligonucleotide
gcuccucaagcuucaacuu

SEQ ID NO: 3008 - RNA, 19 nt, Artificial Sequence
  Description of Artificial Sequence: Synthetic oligonucleotide
cgcuccucaagcuucaacu

SEQ ID NO: 3009 - RNA, 19 nt, Artificial Sequence
  Description of Artificial Sequence: Synthetic oligonucleotide
ucgcuccucaagcuucaac

SEQ ID NO: 3010 - RNA, 19 nt, Artificial Sequence
  Description of Artificial Sequence: Synthetic oligonucleotide
cucgcuccucaagcuucaa

SEQ ID NO: 3011 - RNA, 19 nt, Artificial Sequence
  Description of Artificial Sequence: Synthetic oligonucleotide
ccucgcuccucaagcuuca

SEQ ID NO: 3012 - RNA, 19 nt, Artificial Sequence
  Description of Artificial Sequence: Synthetic oligonucleotide
uccucgcuccucaagcuuc

SEQ ID NO: 3013 - RNA, 19 nt, Artificial Sequence
  Description of Artificial Sequence: Synthetic oligonucleotide
auccucgcuccucaagcuu

SEQ ID NO: 3014 - RNA, 19 nt, Artificial Sequence
  Description of Artificial Sequence: Synthetic oligonucleotide
cauccucgcuccucaagcu

SEQ ID NO: 3015 - RNA, 19 nt, Artificial Sequence
  Description of Artificial Sequence: Synthetic oligonucleotide
ccauccucgcuccucaagc

SEQ ID NO: 3016 - RNA, 19 nt, Artificial Sequence
  Description of Artificial Sequence: Synthetic oligonucleotide
gccauccucgcuccucaag

SEQ ID NO: 3017 - RNA, 19 nt, Artificial Sequence
  Description of Artificial Sequence: Synthetic oligonucleotide
ugccauccucgcuccucaa

SEQ ID NO: 3018 - RNA, 19 nt, Artificial Sequence
  Description of Artificial Sequence: Synthetic oligonucleotide
cugccauccucgcuccuca

SEQ ID NO: 3019 - RNA, 19 nt, Artificial Sequence
  Description of Artificial Sequence: Synthetic oligonucleotide
acugccauccucgcuccuc

SEQ ID NO: 3020 - RNA, 19 nt, Artificial Sequence
  Description of Artificial Sequence: Synthetic oligonucleotide
gacugccauccucgcuccu

SEQ ID NO: 3021 - RNA, 19 nt, Artificial Sequence
  Description of Artificial Sequence: Synthetic oligonucleotide
ugacugccauccucgcucc

SEQ ID NO: 3022 - RNA, 19 nt, Artificial Sequence
  Description of Artificial Sequence: Synthetic oligonucleotide
uugacugccauccucgcuc

SEQ ID NO: 3023 - RNA, 19 nt, Artificial Sequence
  Description of Artificial Sequence: Synthetic oligonucleotide
guugacugccauccucgcu

SEQ ID NO: 3024 - RNA, 19 nt, Artificial Sequence
  Description of Artificial Sequence: Synthetic oligonucleotide
uguugacugccauccucgc

SEQ ID NO: 3025 - RNA, 19 nt, Artificial Sequence
  Description of Artificial Sequence: Synthetic oligonucleotide
uuguugacugccauccucg

SEQ ID NO: 3026 - RNA, 19 nt, Artificial Sequence
  Description of Artificial Sequence: Synthetic oligonucleotide
uuuguugacugccauccuc

SEQ ID NO: 3027 - RNA, 19 nt, Artificial Sequence
  Description of Artificial Sequence: Synthetic oligonucleotide
cuuuguugacugccauccu

SEQ ID NO: 3028 - RNA, 19 nt, Artificial Sequence
  Description of Artificial Sequence: Synthetic oligonucleotide
ccuuuguugacugccaucc

SEQ ID NO: 3029 - RNA, 19 nt, Artificial Sequence
  Description of Artificial Sequence: Synthetic oligonucleotide
gccuuuguugacugccauc

SEQ ID NO: 3030 - RNA, 19 nt, Artificial Sequence
  Description of Artificial Sequence: Synthetic oligonucleotide
ggccuuuguugacugccau

SEQ ID NO: 3031 - RNA, 19 nt, Artificial Sequence
  Description of Artificial Sequence: Synthetic oligonucleotide
aggccuuuguugacugcca

SEQ ID NO: 3032 - RNA, 19 nt, Artificial Sequence
  Description of Artificial Sequence: Synthetic oligonucleotide
gaggccuuuguugacugcc

SEQ ID NO: 3033 - RNA, 19 nt, Artificial Sequence
  Description of Artificial Sequence: Synthetic oligonucleotide
ugaggccuuuguugacugc

SEQ ID NO: 3034 - RNA, 19 nt, Artificial Sequence
  Description of Artificial Sequence: Synthetic oligonucleotide
gugaggccuuuguugacug

SEQ ID NO: 3035 - RNA, 19 nt, Artificial Sequence
  Description of Artificial Sequence: Synthetic oligonucleotide
ggugaggccuuuguugacu

SEQ ID NO: 3036 - RNA, 19 nt, Artificial Sequence
  Description of Artificial Sequence: Synthetic oligonucleotide
aggugaggccuuuguugac

SEQ ID NO: 3037 - RNA, 19 nt, Artificial Sequence
  Description of Artificial Sequence: Synthetic oligonucleotide
aaggugaggccuuuguuga

SEQ ID NO: 3038 - RNA, 19 nt, Artificial Sequence
  Description of Artificial Sequence: Synthetic oligonucleotide
caaggugaggccuuuguug

SEQ ID NO: 3039 - RNA, 19 nt, Artificial Sequence
  Description of Artificial Sequence: Synthetic oligonucleotide
gcaaggugaggccuuuguu

SEQ ID NO: 3040 - RNA, 19 nt, Artificial Sequence
  Description of Artificial Sequence: Synthetic oligonucleotide
agcaaggugaggccuuugu

SEQ ID NO: 3041 - RNA, 19 nt, Artificial Sequence
  Description of Artificial Sequence: Synthetic oligonucleotide
cagcaaggugaggccuuug

SEQ ID NO: 3042 - RNA, 19 nt, Artificial Sequence
  Description of Artificial Sequence: Synthetic oligonucleotide
ccagcaaggugaggccuuu

SEQ ID NO: 3043 - RNA, 19 nt, Artificial Sequence
  Description of Artificial Sequence: Synthetic oligonucleotide
uccagcaaggugaggccuu

SEQ ID NO: 3044 - RNA, 19 nt, Artificial Sequence
  Description of Artificial Sequence: Synthetic oligonucleotide
auccagcaaggugaggccu

SEQ ID NO: 3045 - RNA, 19 nt, Artificial Sequence
  Description of Artificial Sequence: Synthetic oligonucleotide
cauccagcaaggugaggcc

SEQ ID NO: 3046 - RNA, 19 nt, Artificial Sequence
  Description of Artificial Sequence: Synthetic oligonucleotide
ccauccagcaaggugaggc

SEQ ID NO: 3047 - RNA, 19 nt, Artificial Sequence
  Description of Artificial Sequence: Synthetic oligonucleotide
uccauccagcaaggugagg

SEQ ID NO: 3048 - RNA, 19 nt, Artificial Sequence
  Description of Artificial Sequence: Synthetic oligonucleotide
cuccauccagcaaggugag

SEQ ID NO: 3049 - RNA, 19 nt, Artificial Sequence
  Description of Artificial Sequence: Synthetic oligonucleotide
ucuccauccagcaagguga

SEQ ID NO: 3050 - RNA, 19 nt, Artificial Sequence
  Description of Artificial Sequence: Synthetic oligonucleotide
gucuccauccagcaaggug

SEQ ID NO: 3051 - RNA, 19 nt, Artificial Sequence
  Description of Artificial Sequence: Synthetic oligonucleotide
ggucuccauccagcaaggu

SEQ ID NO: 3052 - RNA, 19 nt, Artificial Sequence
  Description of Artificial Sequence: Synthetic oligonucleotide
aggucuccauccagcaagg

SEQ ID NO: 3053 - RNA, 19 nt, Artificial Sequence
  Description of Artificial Sequence: Synthetic oligonucleotide
gaggucuccauccagcaag

SEQ ID NO: 3054 - RNA, 19 nt, Artificial Sequence
  Description of Artificial Sequence: Synthetic oligonucleotide
ggaggucuccauccagcaa

SEQ ID NO: 3055 - RNA, 19 nt, Artificial Sequence
  Description of Artificial Sequence: Synthetic oligonucleotide
gggaggucuccauccagca

SEQ ID NO: 3056 - RNA, 19 nt, Artificial Sequence
  Description of Artificial Sequence: Synthetic oligonucleotide
agggaggucuccauccagc

SEQ ID NO: 3057 - RNA, 19 nt, Artificial Sequence
  Description of Artificial Sequence: Synthetic oligonucleotide
cagggaggucuccauccag

SEQ ID NO: 3058 - RNA, 19 nt, Artificial Sequence
  Description of Artificial Sequence: Synthetic oligonucleotide
ucagggaggucuccaucca

SEQ ID NO: 3059 - RNA, 19 nt, Artificial Sequence
  Description of Artificial Sequence: Synthetic oligonucleotide
cucagggaggucuccaucc

SEQ ID NO: 3060 - RNA, 19 nt, Artificial Sequence
  Description of Artificial Sequence: Synthetic oligonucleotide
gcucagggaggucuccauc

SEQ ID NO: 3061 - RNA, 19 nt, Artificial Sequence
  Description of Artificial Sequence: Synthetic oligonucleotide
ugcucagggaggucuccau

SEQ ID NO: 3062 - RNA, 19 nt, Artificial Sequence
  Description of Artificial Sequence: Synthetic oligonucleotide
cugcucagggaggucucca

SEQ ID NO: 3063 - RNA, 19 nt, Artificial Sequence
  Description of Artificial Sequence: Synthetic oligonucleotide
ccugcucagggaggucucc

SEQ ID NO: 3064 - RNA, 19 nt, Artificial Sequence
  Description of Artificial Sequence: Synthetic oligonucleotide
uccugcucagggaggucuc

SEQ ID NO: 3065 - RNA, 19 nt, Artificial Sequence
  Description of Artificial Sequence: Synthetic oligonucleotide
cuccugcucagggaggucu

SEQ ID NO: 3066 - RNA, 19 nt, Artificial Sequence
  Description of Artificial Sequence: Synthetic oligonucleotide
ucuccugcucagggagguc

SEQ ID NO: 3067 - RNA, 19 nt, Artificial Sequence
  Description of Artificial Sequence: Synthetic oligonucleotide
uucuccugcucagggaggu

SEQ ID NO: 3068 - RNA, 19 nt, Artificial Sequence
  Description of Artificial Sequence: Synthetic oligonucleotide
auucuccugcucagggagg

SEQ ID NO: 3069 - RNA, 19 nt, Artificial Sequence
  Description of Artificial Sequence: Synthetic oligonucleotide
cauucuccugcucagggag

SEQ ID NO: 3070 - RNA, 19 nt, Artificial Sequence
  Description of Artificial Sequence: Synthetic oligonucleotide
acauucuccugcucaggga

SEQ ID NO: 3071 - RNA, 19 nt, Artificial Sequence
  Description of Artificial Sequence: Synthetic oligonucleotide
cacauucuccugcucaggg

SEQ ID NO: 3072 - RNA, 19 nt, Artificial Sequence
  Description of Artificial Sequence: Synthetic oligonucleotide
gcacauucuccugcucagg

SEQ ID NO: 3073 - RNA, 19 nt, Artificial Sequence
  Description of Artificial Sequence: Synthetic oligonucleotide
agcacauucuccugcucag

SEQ ID NO: 3074 - RNA, 19 nt, Artificial Sequence
  Description of Artificial Sequence: Synthetic oligonucleotide
cagcacauucuccugcuca

SEQ ID NO: 3075 - RNA, 19 nt, Artificial Sequence
  Description of Artificial Sequence: Synthetic oligonucleotide
gcagcacauucuccugcuc

SEQ ID NO: 3076 - RNA, 19 nt, Artificial Sequence
  Description of Artificial Sequence: Synthetic oligonucleotide
ugcagcacauucuccugcu

SEQ ID NO: 3077 - RNA, 19 nt, Artificial Sequence
  Description of Artificial Sequence: Synthetic oligonucleotide
cugcagcacauucuccugc

SEQ ID NO: 3078 - RNA, 19 nt, Artificial Sequence
  Description of Artificial Sequence: Synthetic oligonucleotide
gcugcagcacauucuccug

SEQ ID NO: 3079 - RNA, 19 nt, Artificial Sequence
  Description of Artificial Sequence: Synthetic oligonucleotide
cgcugcagcacauucuccu

SEQ ID NO: 3080 - RNA, 19 nt, Artificial Sequence
  Description of Artificial Sequence: Synthetic oligonucleotide
ccgcugcagcacauucucc

SEQ ID NO: 3081 - RNA, 19 nt, Artificial Sequence
  Description of Artificial Sequence: Synthetic oligonucleotide
cccgcugcagcacauucuc

SEQ ID NO: 3082 - RNA, 19 nt, Artificial Sequence
  Description of Artificial Sequence: Synthetic oligonucleotide
acccgcugcagcacauucu

SEQ ID NO: 3083 - RNA, 19 nt, Artificial Sequence
  Description of Artificial Sequence: Synthetic oligonucleotide
gacccgcugcagcacauuc

SEQ ID NO: 3084 - RNA, 19 nt, Artificial Sequence
  Description of Artificial Sequence: Synthetic oligonucleotide
ggacccgcugcagcacauu

SEQ ID NO: 3085 - RNA, 19 nt, Artificial Sequence
  Description of Artificial Sequence: Synthetic oligonucleotide
aggacccgcugcagcacau

SEQ ID NO: 3086 - RNA, 19 nt, Artificial Sequence
  Description of Artificial Sequence: Synthetic oligonucleotide
caggacccgcugcagcaca

SEQ ID NO: 3087 - RNA, 19 nt, Artificial Sequence
  Description of Artificial Sequence: Synthetic oligonucleotide
gcaggacccgcugcagcac

SEQ ID NO: 3088 - RNA, 19 nt, Artificial Sequence
  Description of Artificial Sequence: Synthetic oligonucleotide
ugcaggacccgcugcagca

SEQ ID NO: 3089 - RNA, 19 nt, Artificial Sequence
  Description of Artificial Sequence: Synthetic oligonucleotide
cugcaggacccgcugcagc

SEQ ID NO: 3090 - RNA, 19 nt, Artificial Sequence
  Description of Artificial Sequence: Synthetic oligonucleotide
gcugcaggacccgcugcag

SEQ ID NO: 3091 - RNA, 19 nt, Artificial Sequence
  Description of Artificial Sequence: Synthetic oligonucleotide
agcugcaggacccgcugca

SEQ ID NO: 3092 - RNA, 19 nt, Artificial Sequence
  Description of Artificial Sequence: Synthetic oligonucleotide
cagcugcaggacccgcugc

SEQ ID NO: 3093 - RNA, 19 nt, Artificial Sequence
  Description of Artificial Sequence: Synthetic oligonucleotide
gcagcugcaggacccgcug

SEQ ID NO: 3094 - RNA, 19 nt, Artificial Sequence
  Description of Artificial Sequence: Synthetic oligonucleotide
ggcagcugcaggacccgcu

SEQ ID NO: 3095 - RNA, 19 nt, Artificial Sequence
  Description of Artificial Sequence: Synthetic oligonucleotide
cggcagcugcaggacccgc

SEQ ID NO: 3096 - RNA, 19 nt, Artificial Sequence
  Description of Artificial Sequence: Synthetic oligonucleotide
ccggcagcugcaggacccg

SEQ ID NO: 3097 - RNA, 19 nt, Artificial Sequence
  Description of Artificial Sequence: Synthetic oligonucleotide
accggcagcugcaggaccc

SEQ ID NO: 3098 - RNA, 19 nt, Artificial Sequence
  Description of Artificial Sequence: Synthetic oligonucleotide
caccggcagcugcaggacc

SEQ ID NO: 3099 - RNA, 19 nt, Artificial Sequence
  Description of Artificial Sequence: Synthetic oligonucleotide
ccaccggcagcugcaggac

SEQ ID NO: 3100 - RNA, 19 nt, Artificial Sequence
  Description of Artificial Sequence: Synthetic oligonucleotide
accaccggcagcugcagga

SEQ ID NO: 3101 - RNA, 19 nt, Artificial Sequence
  Description of Artificial Sequence: Synthetic oligonucleotide
caccaccggcagcugcagg

SEQ ID NO: 3102 - RNA, 19 nt, Artificial Sequence
  Description of Artificial Sequence: Synthetic oligonucleotide
ucaccaccggcagcugcag

SEQ ID NO: 3103 - RNA, 19 nt, Artificial Sequence
  Description of Artificial Sequence: Synthetic oligonucleotide
cucaccaccggcagcugca

SEQ ID NO: 3104 - RNA, 19 nt, Artificial Sequence
  Description of Artificial Sequence: Synthetic oligonucleotide
acucaccaccggcagcugc

SEQ ID NO: 3105 - RNA, 19 nt, Artificial Sequence
  Description of Artificial Sequence: Synthetic oligonucleotide
cacucaccaccggcagcug

SEQ ID NO: 3106 - RNA, 19 nt, Artificial Sequence
  Description of Artificial Sequence: Synthetic oligonucleotide
ccacucaccaccggcagcu

SEQ ID NO: 3107 - RNA, 19 nt, Artificial Sequence
  Description of Artificial Sequence: Synthetic oligonucleotide
gccacucaccaccggcagc

SEQ ID NO: 3108 - RNA, 19 nt, Artificial Sequence
  Description of Artificial Sequence: Synthetic oligonucleotide
ugccacucaccaccggcag

SEQ ID NO: 3109 - RNA, 19 nt, Artificial Sequence
  Description of Artificial Sequence: Synthetic oligonucleotide
gugccacucaccaccggca

SEQ ID NO: 3110 - RNA, 19 nt, Artificial Sequence
  Description of Artificial Sequence: Synthetic oligonucleotide
ggugccacucaccaccggc

SEQ ID NO: 3111 - RNA, 19 nt, Artificial Sequence
  Description of Artificial Sequence: Synthetic oligonucleotide
aggugccacucaccaccgg

SEQ ID NO: 3112 - RNA, 19 nt, Artificial Sequence
  Description of Artificial Sequence: Synthetic oligonucleotide
caggugccacucaccaccg

SEQ ID NO: 3113 - RNA, 19 nt, Artificial Sequence
  Description of Artificial Sequence: Synthetic oligonucleotide
gcaggugccacucaccacc

SEQ ID NO: 3114 - RNA, 19 nt, Artificial Sequence
  Description of Artificial Sequence: Synthetic oligonucleotide
cgcaggugccacucaccac

SEQ ID NO: 3115 - RNA, 19 nt, Artificial Sequence
  Description of Artificial Sequence: Synthetic oligonucleotide
ucgcaggugccacucacca

SEQ ID NO: 3116 - RNA, 19 nt, Artificial Sequence
  Description of Artificial Sequence: Synthetic oligonucleotide
uucgcaggugccacucacc

SEQ ID NO: 3117 - RNA, 19 nt, Artificial Sequence
  Description of Artificial Sequence: Synthetic oligonucleotide
auucgcaggugccacucac

SEQ ID NO: 3118 - RNA, 19 nt, Artificial Sequence
  Description of Artificial Sequence: Synthetic oligonucleotide
cauucgcaggugccacuca

SEQ ID NO: 3119 - RNA, 19 nt, Artificial Sequence
  Description of Artificial Sequence: Synthetic oligonucleotide
gcauucgcaggugccacuc

SEQ ID NO: 3120 - RNA, 19 nt, Artificial Sequence
  Description of Artificial Sequence: Synthetic oligonucleotide
agcauucgcaggugccacu

SEQ ID NO: 3121 - RNA, 19 nt, Artificial Sequence
  Description of Artificial Sequence: Synthetic oligonucleotide
aagcauucgcaggugccac

SEQ ID NO: 3122 - RNA, 19 nt, Artificial Sequence
  Description of Artificial Sequence: Synthetic oligonucleotide
gaagcauucgcaggugcca

SEQ ID NO: 3123 - RNA, 19 nt, Artificial Sequence
  Description of Artificial Sequence: Synthetic oligonucleotide
ggaagcauucgcaggugcc

SEQ ID NO: 3124 - RNA, 19 nt, Artificial Sequence
  Description of Artificial Sequence: Synthetic oligonucleotide
uggaagcauucgcaggugc

SEQ ID NO: 3125 - RNA, 19 nt, Artificial Sequence
  Description of Artificial Sequence: Synthetic oligonucleotide
cuggaagcauucgcaggug

SEQ ID NO: 3126 - RNA, 19 nt, Artificial Sequence
  Description of Artificial Sequence: Synthetic oligonucleotide
ucuggaagcauucgcaggu

SEQ ID NO: 3127 - RNA, 19 nt, Artificial Sequence
  Description of Artificial Sequence: Synthetic oligonucleotide
uucuggaagcauucgcagg

SEQ ID NO: 3128 - RNA, 19 nt, Artificial Sequence
  Description of Artificial Sequence: Synthetic oligonucleotide
cuucuggaagcauucgcag

SEQ ID NO: 3129 - RNA, 19 nt, Artificial Sequence
  Description of Artificial Sequence: Synthetic oligonucleotide
ucuucuggaagcauucgca

SEQ ID NO: 3130 - RNA, 19 nt, Artificial Sequence
  Description of Artificial Sequence: Synthetic oligonucleotide
gucuucuggaagcauucgc

SEQ ID NO: 3131 - RNA, 19 nt, Artificial Sequence
  Description of Artificial Sequence: Synthetic oligonucleotide
ggucuucuggaagcauucg

SEQ ID NO: 3132 - RNA, 19 nt, Artificial Sequence
  Description of Artificial Sequence: Synthetic oligonucleotide
aggucuucuggaagcauuc

SEQ ID NO: 3133 - RNA, 19 nt, Artificial Sequence
  Description of Artificial Sequence: Synthetic oligonucleotide
uaggucuucuggaagcauu

SEQ ID NO: 3134 - RNA, 19 nt, Artificial Sequence
  Description of Artificial Sequence: Synthetic oligonucleotide
guaggucuucuggaagcau

SEQ ID NO: 3135 - RNA, 19 nt, Artificial Sequence
  Description of Artificial Sequence: Synthetic oligonucleotide
uguaggucuucuggaagca

SEQ ID NO: 3136 - RNA, 19 nt, Artificial Sequence
  Description of Artificial Sequence: Synthetic oligonucleotide
guguaggucuucuggaagc

SEQ ID NO: 3137 - RNA, 19 nt, Artificial Sequence
  Description of Artificial Sequence: Synthetic oligonucleotide
gguguaggucuucuggaag

SEQ ID NO: 3138 - RNA, 19 nt, Artificial Sequence
  Description of Artificial Sequence: Synthetic oligonucleotide
ugguguaggucuucuggaa

SEQ ID NO: 3139 - RNA, 19 nt, Artificial Sequence
  Description of Artificial Sequence: Synthetic oligonucleotide
cugguguaggucuucugga

SEQ ID NO: 3140 - RNA, 19 nt, Artificial Sequence
  Description of Artificial Sequence: Synthetic oligonucleotide
gcugguguaggucuucugg

SEQ ID NO: 3141 - RNA, 19 nt, Artificial Sequence
  Description of Artificial Sequence: Synthetic oligonucleotide
ugcugguguaggucuucug

SEQ ID NO: 3142 - RNA, 19 nt, Artificial Sequence
  Description of Artificial Sequence: Synthetic oligonucleotide
gugcugguguaggucuucu

SEQ ID NO: 3143 - RNA, 19 nt, Artificial Sequence
  Description of Artificial Sequence: Synthetic oligonucleotide
agugcugguguaggucuuc

SEQ ID NO: 3144 - RNA, 19 nt, Artificial Sequence
  Description of Artificial Sequence: Synthetic oligonucleotide
uagugcugguguaggucuu

SEQ ID NO: 3145 - RNA, 19 nt, Artificial Sequence
  Description of Artificial Sequence: Synthetic oligonucleotide
uuagugcugguguaggucu

SEQ ID NO: 3146 - RNA, 19 nt, Artificial Sequence
  Description of Artificial Sequence: Synthetic oligonucleotide
cuuagugcugguguagguc

SEQ ID NO: 3147 - RNA, 19 nt, Artificial Sequence
  Description of Artificial Sequence: Synthetic oligonucleotide
ccuuagugcugguguaggu

SEQ ID NO: 3148 - RNA, 19 nt, Artificial Sequence
  Description of Artificial Sequence: Synthetic oligonucleotide
uccuuagugcugguguagg

SEQ ID NO: 3149 - RNA, 19 nt, Artificial Sequence
  Description of Artificial Sequence: Synthetic oligonucleotide
uuccuuagugcugguguag

SEQ ID NO: 3150 - RNA, 19 nt, Artificial Sequence
  Description of Artificial Sequence: Synthetic oligonucleotide
cuuccuuagugcuggugua

SEQ ID NO: 3151 - RNA, 19 nt, Artificial Sequence
  Description of Artificial Sequence: Synthetic oligonucleotide
gcuuccuuagugcuggugu

SEQ ID NO: 3152 - RNA, 19 nt, Artificial Sequence
  Description of Artificial Sequence: Synthetic oligonucleotide
ggcuuccuuagugcuggug

SEQ ID NO: 3153 - RNA, 19 nt, Artificial Sequence
  Description of Artificial Sequence: Synthetic oligonucleotide
gggcuuccuuagugcuggu

SEQ ID NO: 3154 - RNA, 19 nt, Artificial Sequence
  Description of Artificial Sequence: Synthetic oligonucleotide
ugggcuuccuuagugcugg

SEQ ID NO: 3155 - RNA, 19 nt, Artificial Sequence
  Description of Artificial Sequence: Synthetic oligonucleotide
gugggcuuccuuagugcug

SEQ ID NO: 3156 - RNA, 19 nt, Artificial Sequence
  Description of Artificial Sequence: Synthetic oligonucleotide
ggugggcuuccuuagugcu

SEQ ID NO: 3157 - RNA, 19 nt, Artificial Sequence
  Description of Artificial Sequence: Synthetic oligonucleotide
gggugggcuuccuuagugc

SEQ ID NO: 3158 - RNA, 19 nt, Artificial Sequence
  Description of Artificial Sequence: Synthetic oligonucleotide
ggggugggcuuccuuagug

SEQ ID NO: 3159 - RNA, 19 nt, Artificial Sequence
  Description of Artificial Sequence: Synthetic oligonucleotide
gggggugggcuuccuuagu

SEQ ID NO: 3160 - RNA, 19 nt, Artificial Sequence
  Description of Artificial Sequence: Synthetic oligonucleotide
agggggugggcuuccuuag

SEQ ID NO: 3161 - RNA, 19 nt, Artificial Sequence
  Description of Artificial Sequence: Synthetic oligonucleotide
cagggggugggcuuccuua

SEQ ID NO: 3162 - RNA, 19 nt, Artificial Sequence
  Description of Artificial Sequence: Synthetic oligonucleotide
ccagggggugggcuuccuu

SEQ ID NO: 3163 - RNA, 19 nt, Artificial Sequence
  Description of Artificial Sequence: Synthetic oligonucleotide
accagggggugggcuuccu

SEQ ID NO: 3164 - RNA, 19 nt, Artificial Sequence
  Description of Artificial Sequence: Synthetic oligonucleotide
caccagggggugggcuucc

SEQ ID NO: 3165 - RNA, 19 nt, Artificial Sequence
  Description of Artificial Sequence: Synthetic oligonucleotide
ccaccagggggugggcuuc

SEQ ID NO: 3166 - RNA, 19 nt, Artificial Sequence
  Description of Artificial Sequence: Synthetic oligonucleotide
gccaccagggggugggcuu

SEQ ID NO: 3167 - RNA, 19 nt, Artificial Sequence
  Description of Artificial Sequence: Synthetic oligonucleotide
ggccaccagggggugggcu

SEQ ID NO: 3168 - RNA, 19 nt, Artificial Sequence
  Description of Artificial Sequence: Synthetic oligonucleotide
aggccaccagggggugggc

SEQ ID NO: 3169 - RNA, 19 nt, Artificial Sequence
  Description of Artificial Sequence: Synthetic oligonucleotide
gaggccaccaggggguggg

SEQ ID NO: 3170 - RNA, 19 nt, Artificial Sequence
  Description of Artificial Sequence: Synthetic oligonucleotide
agaggccaccagggggugg

SEQ ID NO: 3171 - RNA, 19 nt, Artificial Sequence
  Description of Artificial Sequence: Synthetic oligonucleotide
cagaggccaccagggggug

SEQ ID NO: 3172 - RNA, 19 nt, Artificial Sequence
  Description of Artificial Sequence: Synthetic oligonucleotide
acagaggccaccagggggu

SEQ ID NO: 3173 - RNA, 19 nt, Artificial Sequence
  Description of Artificial Sequence: Synthetic oligonucleotide
cacagaggccaccaggggg

SEQ ID NO: 3174 - RNA, 19 nt, Artificial Sequence
  Description of Artificial Sequence: Synthetic oligonucleotide
acacagaggccaccagggg

SEQ ID NO: 3175 - RNA, 19 nt, Artificial Sequence
  Description of Artificial Sequence: Synthetic oligonucleotide
cacacagaggccaccaggg

SEQ ID NO: 3176 - RNA, 19 nt, Artificial Sequence
  Description of Artificial Sequence: Synthetic oligonucleotide
gcacacagaggccaccagg

SEQ ID NO: 3177 - RNA, 19 nt, Artificial Sequence
  Description of Artificial Sequence: Synthetic oligonucleotide
ugcacacagaggccaccag

SEQ ID NO: 3178 - RNA, 19 nt, Artificial Sequence
  Description of Artificial Sequence: Synthetic oligonucleotide
uugcacacagaggccacca

SEQ ID NO: 3179 - RNA, 19 nt, Artificial Sequence
  Description of Artificial Sequence: Synthetic oligonucleotide
auugcacacagaggccacc

SEQ ID NO: 3180 - RNA, 19 nt, Artificial Sequence
  Description of Artificial Sequence: Synthetic oligonucleotide
cauugcacacagaggccac

SEQ ID NO: 3181 - RNA, 19 nt, Artificial Sequence
  Description of Artificial Sequence: Synthetic oligonucleotide
gcauugcacacagaggcca

SEQ ID NO: 3182 - RNA, 19 nt, Artificial Sequence
  Description of Artificial Sequence: Synthetic oligonucleotide
ggcauugcacacagaggcc

SEQ ID NO: 3183 - RNA, 19 nt, Artificial Sequence
  Description of Artificial Sequence: Synthetic oligonucleotide
aggcauugcacacagaggc

SEQ ID NO: 3184 - RNA, 19 nt, Artificial Sequence
  Description of Artificial Sequence: Synthetic oligonucleotide
uaggcauugcacacagagg

SEQ ID NO: 3185 - RNA, 19 nt, Artificial Sequence
  Description of Artificial Sequence: Synthetic oligonucleotide
auaggcauugcacacagag

SEQ ID NO: 3186 - RNA, 19 nt, Artificial Sequence
  Description of Artificial Sequence: Synthetic oligonucleotide
cauaggcauugcacacaga

SEQ ID NO: 3187 - RNA, 19 nt, Artificial Sequence
  Description of Artificial Sequence: Synthetic oligonucleotide
ucauaggcauugcacacag

SEQ ID NO: 3188 - RNA, 19 nt, Artificial Sequence
  Description of Artificial Sequence: Synthetic oligonucleotide
cucauaggcauugcacaca

SEQ ID NO: 3189 - RNA, 19 nt, Artificial Sequence
  Description of Artificial Sequence: Synthetic oligonucleotide
ucucauaggcauugcacac

SEQ ID NO: 3190 - RNA, 19 nt, Artificial Sequence
  Description of Artificial Sequence: Synthetic oligonucleotide
uucucauaggcauugcaca

SEQ ID NO: 3191 - RNA, 19 nt, Artificial Sequence
  Description of Artificial Sequence: Synthetic oligonucleotide
cuucucauaggcauugcac

SEQ ID NO: 3192 - RNA, 19 nt, Artificial Sequence
  Description of Artificial Sequence: Synthetic oligonucleotide
ccuucucauaggcauugca

SEQ ID NO: 3193 - RNA, 19 nt, Artificial Sequence
  Description of Artificial Sequence: Synthetic oligonucleotide
cccuucucauaggcauugc

SEQ ID NO: 3194 - RNA, 19 nt, Artificial Sequence
  Description of Artificial Sequence: Synthetic oligonucleotide
gcccuucucauaggcauug

SEQ ID NO: 3195 - RNA, 19 nt, Artificial Sequence
  Description of Artificial Sequence: Synthetic oligonucleotide
cgcccuucucauaggcauu

SEQ ID NO: 3196 - RNA, 19 nt, Artificial Sequence
  Description of Artificial Sequence: Synthetic oligonucleotide
acgcccuucucauaggcau

SEQ ID NO: 3197 - RNA, 19 nt, Artificial Sequence
  Description of Artificial Sequence: Synthetic oligonucleotide
cacgcccuucucauaggca

SEQ ID NO: 3198 - RNA, 19 nt, Artificial Sequence
  Description of Artificial Sequence: Synthetic oligonucleotide
gcacgcccuucucauaggc

SEQ ID NO: 3199 - RNA, 19 nt, Artificial Sequence
  Description of Artificial Sequence: Synthetic oligonucleotide
ugcacgcccuucucauagg

SEQ ID NO: 3200 - RNA, 19 nt, Artificial Sequence
  Description of Artificial Sequence: Synthetic oligonucleotide
cugcacgcccuucucauag

SEQ ID NO: 3201 - RNA, 19 nt, Artificial Sequence
  Description of Artificial Sequence: Synthetic oligonucleotide
ucugcacgcccuucucaua

SEQ ID NO: 3202 - RNA, 19 nt, Artificial Sequence
  Description of Artificial Sequence: Synthetic oligonucleotide
cucugcacgcccuucucau

SEQ ID NO: 3203 - RNA, 19 nt, Artificial Sequence
  Description of Artificial Sequence: Synthetic oligonucleotide
gcucugcacgcccuucuca

SEQ ID NO: 3204 - RNA, 19 nt, Artificial Sequence
  Description of Artificial Sequence: Synthetic oligonucleotide
cgcucugcacgcccuucuc

SEQ ID NO: 3205 - RNA, 19 nt, Artificial Sequence
  Description of Artificial Sequence: Synthetic oligonucleotide
gcgcucugcacgcccuucu

SEQ ID NO: 3206 - RNA, 19 nt, Artificial Sequence
  Description of Artificial Sequence: Synthetic oligonucleotide
ggcgcucugcacgcccuuc

SEQ ID NO: 3207 - RNA, 19 nt, Artificial Sequence
  Description of Artificial Sequence: Synthetic oligonucleotide
uggcgcucugcacgcccuu

SEQ ID NO: 3208 - RNA, 19 nt, Artificial Sequence
  Description of Artificial Sequence: Synthetic oligonucleotide
cuggcgcucugcacgcccu

SEQ ID NO: 3209 - RNA, 19 nt, Artificial Sequence
  Description of Artificial Sequence: Synthetic oligonucleotide
acuggcgcucugcacgccc

SEQ ID NO: 3210 - RNA, 19 nt, Artificial Sequence
  Description of Artificial Sequence: Synthetic oligonucleotide
uacuggcgcucugcacgcc

SEQ ID NO: 3211 - RNA, 19 nt, Artificial Sequence
  Description of Artificial Sequence: Synthetic oligonucleotide
cuacuggcgcucugcacgc

SEQ ID NO: 3212 - RNA, 19 nt, Artificial Sequence
  Description of Artificial Sequence: Synthetic oligonucleotide
gcuacuggcgcucugcacg

SEQ ID NO: 3213 - RNA, 19 nt, Artificial Sequence
  Description of Artificial Sequence: Synthetic oligonucleotide
agcuacuggcgcucugcac

SEQ ID NO: 3214 - RNA, 19 nt, Artificial Sequence
  Description of Artificial Sequence: Synthetic oligonucleotide
aagcuacuggcgcucugca

SEQ ID NO: 3215 - RNA, 19 nt, Artificial Sequence
  Description of Artificial Sequence: Synthetic oligonucleotide
caagcuacuggcgcucugc

SEQ ID NO: 3216 - RNA, 19 nt, Artificial Sequence
  Description of Artificial Sequence: Synthetic oligonucleotide
ccaagcuacuggcgcucug

SEQ ID NO: 3217 - RNA, 19 nt, Artificial Sequence
  Description of Artificial Sequence: Synthetic oligonucleotide
gccaagcuacuggcgcucu

SEQ ID NO: 3218 - RNA, 19 nt, Artificial Sequence
  Description of Artificial Sequence: Synthetic oligonucleotide
agccaagcuacuggcgcuc

SEQ ID NO: 3219 - RNA, 19 nt, Artificial Sequence
  Description of Artificial Sequence: Synthetic oligonucleotide
cagccaagcuacuggcgcu

SEQ ID NO: 3220 - RNA, 19 nt, Artificial Sequence
  Description of Artificial Sequence: Synthetic oligonucleotide
gcagccaagcuacuggcgc

SEQ ID NO: 3221 - RNA, 19 nt, Artificial Sequence
  Description of Artificial Sequence: Synthetic oligonucleotide
ggcagccaagcuacuggcg

SEQ ID NO: 3222 - RNA, 19 nt, Artificial Sequence
  Description of Artificial Sequence: Synthetic oligonucleotide
aggcagccaagcuacuggc

SEQ ID NO: 3223 - RNA, 19 nt, Artificial Sequence
  Description of Artificial Sequence: Synthetic oligonucleotide
caggcagccaagcuacugg

SEQ ID NO: 3224 - RNA, 19 nt, Artificial Sequence
  Description of Artificial Sequence: Synthetic oligonucleotide
ccaggcagccaagcuacug

SEQ ID NO: 3225 - RNA, 19 nt, Artificial Sequence
  Description of Artificial Sequence: Synthetic oligonucleotide
uccaggcagccaagcuacu

SEQ ID NO: 3226 - RNA, 19 nt, Artificial Sequence
  Description of Artificial Sequence: Synthetic oligonucleotide
cuccaggcagccaagcuac

SEQ ID NO: 3227 - RNA, 19 nt, Artificial Sequence
  Description of Artificial Sequence: Synthetic oligonucleotide
gcuccaggcagccaagcua

SEQ ID NO: 3228 - RNA, 19 nt, Artificial Sequence
  Description of Artificial Sequence: Synthetic oligonucleotide
ugcuccaggcagccaagcu

SEQ ID NO: 3229 - RNA, 19 nt, Artificial Sequence
  Description of Artificial Sequence: Synthetic oligonucleotide
augcuccaggcagccaagc

SEQ ID NO: 3230 - RNA, 19 nt, Artificial Sequence
  Description of Artificial Sequence: Synthetic oligonucleotide
caugcuccaggcagccaag

SEQ ID NO: 3231 - RNA, 19 nt, Artificial Sequence
  Description of Artificial Sequence: Synthetic oligonucleotide
ccaugcuccaggcagccaa

SEQ ID NO: 3232 - RNA, 19 nt, Artificial Sequence
  Description of Artificial Sequence: Synthetic oligonucleotide
uccaugcuccaggcagcca

SEQ ID NO: 3233 - RNA, 19 nt, Artificial Sequence
  Description of Artificial Sequence: Synthetic oligonucleotide
cuccaugcuccaggcagcc

SEQ ID NO: 3234 - RNA, 19 nt, Artificial Sequence
  Description of Artificial Sequence: Synthetic oligonucleotide
gcuccaugcuccaggcagc

SEQ ID NO: 3235 - RNA, 19 nt, Artificial Sequence
  Description of Artificial Sequence: Synthetic oligonucleotide
ggcuccaugcuccaggcag

SEQ ID NO: 3236 - RNA, 19 nt, Artificial Sequence
  Description of Artificial Sequence: Synthetic oligonucleotide
cggcuccaugcuccaggca

SEQ ID NO: 3237 - RNA, 19 nt, Artificial Sequence
  Description of Artificial Sequence: Synthetic oligonucleotide
ccggcuccaugcuccaggc

SEQ ID NO: 3238 - RNA, 19 nt, Artificial Sequence
  Description of Artificial Sequence: Synthetic oligonucleotide
accggcuccaugcuccagg

SEQ ID NO: 3239 - RNA, 19 nt, Artificial Sequence
  Description of Artificial Sequence: Synthetic oligonucleotide
caccggcuccaugcuccag

SEQ ID NO: 3240 - RNA, 19 nt, Artificial Sequence
  Description of Artificial Sequence: Synthetic oligonucleotide
ccaccggcuccaugcucca

SEQ ID NO: 3241 - RNA, 19 nt, Artificial Sequence
  Description of Artificial Sequence: Synthetic oligonucleotide
accaccggcuccaugcucc

SEQ ID NO: 3242 - RNA, 19 nt, Artificial Sequence
  Description of Artificial Sequence: Synthetic oligonucleotide
gaccaccggcuccaugcuc

SEQ ID NO: 3243 - RNA, 19 nt, Artificial Sequence
  Description of Artificial Sequence: Synthetic oligonucleotide
ggaccaccggcuccaugcu

SEQ ID NO: 3244 - RNA, 19 nt, Artificial Sequence
  Description of Artificial Sequence: Synthetic oligonucleotide
cggaccaccggcuccaugc

SEQ ID NO: 3245 - RNA, 19 nt, Artificial Sequence
  Description of Artificial Sequence: Synthetic oligonucleotide
gcggaccaccggcuccaug

SEQ ID NO: 3246 - RNA, 19 nt, Artificial Sequence
  Description of Artificial Sequence: Synthetic oligonucleotide
ugcggaccaccggcuccau

SEQ ID NO: 3247 - RNA, 19 nt, Artificial Sequence
  Description of Artificial Sequence: Synthetic oligonucleotide
cugcggaccaccggcucca

SEQ ID NO: 3248 - RNA, 19 nt, Artificial Sequence
  Description of Artificial Sequence: Synthetic oligonucleotide
ccugcggaccaccggcucc

SEQ ID NO: 3249 - RNA, 19 nt, Artificial Sequence
  Description of Artificial Sequence: Synthetic oligonucleotide
gccugcggaccaccggcuc

SEQ ID NO: 3250 - RNA, 19 nt, Artificial Sequence
  Description of Artificial Sequence: Synthetic oligonucleotide
agccugcggaccaccggcu

SEQ ID NO: 3251 - RNA, 19 nt, Artificial Sequence
  Description of Artificial Sequence: Synthetic oligonucleotide
cagccugcggaccaccggc

SEQ ID NO: 3252 - RNA, 19 nt, Artificial Sequence
  Description of Artificial Sequence: Synthetic oligonucleotide
acagccugcggaccaccgg

SEQ ID NO: 3253 - RNA, 19 nt, Artificial Sequence
  Description of Artificial Sequence: Synthetic oligonucleotide
gacagccugcggaccaccg

SEQ ID NO: 3254 - RNA, 19 nt, Artificial Sequence
  Description of Artificial Sequence: Synthetic oligonucleotide
ggacagccugcggaccacc

SEQ ID NO: 3255 - RNA, 19 nt, Artificial Sequence
  Description of Artificial Sequence: Synthetic oligonucleotide
uggacagccugcggaccac

SEQ ID NO: 3256 - RNA, 19 nt, Artificial Sequence
  Description of Artificial Sequence: Synthetic oligonucleotide
guggacagccugcggacca

SEQ ID NO: 3257 - RNA, 19 nt, Artificial Sequence
  Description of Artificial Sequence: Synthetic oligonucleotide
gguggacagccugcggacc

SEQ ID NO: 3258 - RNA, 19 nt, Artificial Sequence
  Description of Artificial Sequence: Synthetic oligonucleotide
ggguggacagccugcggac

SEQ ID NO: 3259 - RNA, 19 nt, Artificial Sequence
  Description of Artificial Sequence: Synthetic oligonucleotide
uggguggacagccugcgga

SEQ ID NO: 3260 - RNA, 19 nt, Artificial Sequence
  Description of Artificial Sequence: Synthetic oligonucleotide
cuggguggacagccugcgg

SEQ ID NO: 3261 - RNA, 19 nt, Artificial Sequence
  Description of Artificial Sequence: Synthetic oligonucleotide
acuggguggacagccugcg

SEQ ID NO: 3262 - RNA, 19 nt, Artificial Sequence
  Description of Artificial Sequence: Synthetic oligonucleotide
aacuggguggacagccugc

SEQ ID NO: 3263 - RNA, 19 nt, Artificial Sequence
  Description of Artificial Sequence: Synthetic oligonucleotide
gaacuggguggacagccug

SEQ ID NO: 3264 - RNA, 19 nt, Artificial Sequence
  Description of Artificial Sequence: Synthetic oligonucleotide
ugaacuggguggacagccu

SEQ ID NO: 3265 - RNA, 19 nt, Artificial Sequence
  Description of Artificial Sequence: Synthetic oligonucleotide
gugaacuggguggacagcc

SEQ ID NO: 3266 - RNA, 19 nt, Artificial Sequence
  Description of Artificial Sequence: Synthetic oligonucleotide
ugugaacuggguggacagc

SEQ ID NO: 3267 - RNA, 19 nt, Artificial Sequence
  Description of Artificial Sequence: Synthetic oligonucleotide
cugugaacuggguggacag

SEQ ID NO: 3268 - RNA, 19 nt, Artificial Sequence
  Description of Artificial Sequence: Synthetic oligonucleotide
gcugugaacuggguggaca

SEQ ID NO: 3269 - RNA, 19 nt, Artificial Sequence
  Description of Artificial Sequence: Synthetic oligonucleotide
agcugugaacuggguggac

SEQ ID NO: 3270 - RNA, 19 nt, Artificial Sequence
  Description of Artificial Sequence: Synthetic oligonucleotide
cagcugugaacugggugga

SEQ ID NO: 3271 - RNA, 19 nt, Artificial Sequence
  Description of Artificial Sequence: Synthetic oligonucleotide
gcagcugugaacugggugg

SEQ ID NO: 3272 - RNA, 19 nt, Artificial Sequence
  Description of Artificial Sequence: Synthetic oligonucleotide
ggcagcugugaacugggug

SEQ ID NO: 3273 - RNA, 19 nt, Artificial Sequence
  Description of Artificial Sequence: Synthetic oligonucleotide
uggcagcugugaacugggu

SEQ ID NO: 3274 - RNA, 19 nt, Artificial Sequence
  Description of Artificial Sequence: Synthetic oligonucleotide
uuggcagcugugaacuggg

SEQ ID NO: 3275 - RNA, 19 nt, Artificial Sequence
  Description of Artificial Sequence: Synthetic oligonucleotide
auuggcagcugugaacugg

SEQ ID NO: 3276 - RNA, 19 nt, Artificial Sequence
  Description of Artificial Sequence: Synthetic oligonucleotide
cauuggcagcugugaacug

SEQ ID NO: 3277 - RNA, 19 nt, Artificial Sequence
  Description of Artificial Sequence: Synthetic oligonucleotide
ucauuggcagcugugaacu

SEQ ID NO: 3278 - RNA, 19 nt, Artificial Sequence
  Description of Artificial Sequence: Synthetic oligonucleotide
cucauuggcagcugugaac

SEQ ID NO: 3279 - RNA, 19 nt, Artificial Sequence
  Description of Artificial Sequence: Synthetic oligonucleotide
gcucauuggcagcugugaa

SEQ ID NO: 3280 - RNA, 19 nt, Artificial Sequence
  Description of Artificial Sequence: Synthetic oligonucleotide
agcucauuggcagcuguga

SEQ ID NO: 3281 - RNA, 19 nt, Artificial Sequence
  Description of Artificial Sequence: Synthetic oligonucleotide
cagcucauuggcagcugug

SEQ ID NO: 3282 - RNA, 19 nt, Artificial Sequence
  Description of Artificial Sequence: Synthetic oligonucleotide
ccagcucauuggcagcugu

SEQ ID NO: 3283 - RNA, 19 nt, Artificial Sequence
  Description of Artificial Sequence: Synthetic oligonucleotide
gccagcucauuggcagcug

SEQ ID NO: 3284 - RNA, 19 nt, Artificial Sequence
  Description of Artificial Sequence: Synthetic oligonucleotide
ggccagcucauuggcagcu

SEQ ID NO: 3285 - RNA, 19 nt, Artificial Sequence
  Description of Artificial Sequence: Synthetic oligonucleotide
aggccagcucauuggcagc

SEQ ID NO: 3286 - RNA, 19 nt, Artificial Sequence
  Description of Artificial Sequence: Synthetic oligonucleotide
caggccagcucauuggcag

SEQ ID NO: 3287 - RNA, 19 nt, Artificial Sequence
  Description of Artificial Sequence: Synthetic oligonucleotide
gcaggccagcucauuggca

SEQ ID NO: 3288 - RNA, 19 nt, Artificial Sequence
  Description of Artificial Sequence: Synthetic oligonucleotide
ggcaggccagcucauuggc

SEQ ID NO: 3289 - RNA, 19 nt, Artificial Sequence
  Description of Artificial Sequence: Synthetic oligonucleotide
cggcaggccagcucauugg

SEQ ID NO: 3290 - RNA, 19 nt, Artificial Sequence
  Description of Artificial Sequence: Synthetic oligonucleotide
ucggcaggccagcucauug

SEQ ID NO: 3291 - RNA, 19 nt, Artificial Sequence
  Description of Artificial Sequence: Synthetic oligonucleotide
cucggcaggccagcucauu

SEQ ID NO: 3292 - RNA, 19 nt, Artificial Sequence
  Description of Artificial Sequence: Synthetic oligonucleotide
ccucggcaggccagcucau

SEQ ID NO: 3293 - RNA, 19 nt, Artificial Sequence
  Description of Artificial Sequence: Synthetic oligonucleotide
gccucggcaggccagcuca

SEQ ID NO: 3294 - RNA, 19 nt, Artificial Sequence
  Description of Artificial Sequence: Synthetic oligonucleotide
agccucggcaggccagcuc

SEQ ID NO: 3295 - RNA, 19 nt, Artificial Sequence
  Description of Artificial Sequence: Synthetic oligonucleotide
aagccucggcaggccagcu

SEQ ID NO: 3296 - RNA, 19 nt, Artificial Sequence
  Description of Artificial Sequence: Synthetic oligonucleotide
caagccucggcaggccagc

SEQ ID NO: 3297 - RNA, 19 nt, Artificial Sequence
  Description of Artificial Sequence: Synthetic oligonucleotide
ccaagccucggcaggccag

SEQ ID NO: 3298 - RNA, 19 nt, Artificial Sequence
  Description of Artificial Sequence: Synthetic oligonucleotide
uccaagccucggcaggcca

SEQ ID NO: 3299 - RNA, 19 nt, Artificial Sequence
  Description of Artificial Sequence: Synthetic oligonucleotide
guccaagccucggcaggcc

SEQ ID NO: 3300 - RNA, 19 nt, Artificial Sequence
  Description of Artificial Sequence: Synthetic oligonucleotide
gguccaagccucggcaggc

SEQ ID NO: 3301 - RNA, 19 nt, Artificial Sequence
  Description of Artificial Sequence: Synthetic oligonucleotide
ugguccaagccucggcagg

SEQ ID NO: 3302 - RNA, 19 nt, Artificial Sequence
  Description of Artificial Sequence: Synthetic oligonucleotide
gugguccaagccucggcag

SEQ ID NO: 3303 - RNA, 19 nt, Artificial Sequence
  Description of Artificial Sequence: Synthetic oligonucleotide
ggugguccaagccucggca

SEQ ID NO: 3304 - RNA, 19 nt, Artificial Sequence
  Description of Artificial Sequence: Synthetic oligonucleotide
aggugguccaagccucggc

SEQ ID NO: 3305 - RNA, 19 nt, Artificial Sequence
  Description of Artificial Sequence: Synthetic oligonucleotide
caggugguccaagccucgg

SEQ ID NO: 3306 - RNA, 19 nt, Artificial Sequence
  Description of Artificial Sequence: Synthetic oligonucleotide
ccaggugguccaagccucg

SEQ ID NO: 3307 - RNA, 19 nt, Artificial Sequence
  Description of Artificial Sequence: Synthetic oligonucleotide
uccaggugguccaagccuc

SEQ ID NO: 3308 - RNA, 19 nt, Artificial Sequence
  Description of Artificial Sequence: Synthetic oligonucleotide
cuccaggugguccaagccu

SEQ ID NO: 3309 - RNA, 19 nt, Artificial Sequence
  Description of Artificial Sequence: Synthetic oligonucleotide
ccuccaggugguccaagcc

SEQ ID NO: 3310 - RNA, 19 nt, Artificial Sequence
  Description of Artificial Sequence: Synthetic oligonucleotide
uccuccaggugguccaagc

SEQ ID NO: 3311 - RNA, 19 nt, Artificial Sequence
  Description of Artificial Sequence: Synthetic oligonucleotide
uuccuccaggugguccaag

SEQ ID NO: 3312 - RNA, 19 nt, Artificial Sequence
  Description of Artificial Sequence: Synthetic oligonucleotide
uuuccuccaggugguccaa

SEQ ID NO: 3313 - RNA, 19 nt, Artificial Sequence
  Description of Artificial Sequence: Synthetic oligonucleotide
uuuuccuccagguggucca

SEQ ID NO: 3314 - RNA, 19 nt, Artificial Sequence
  Description of Artificial Sequence: Synthetic oligonucleotide
cuuuuccuccagguggucc

SEQ ID NO: 3315 - RNA, 19 nt, Artificial Sequence
  Description of Artificial Sequence: Synthetic oligonucleotide
ucuuuuccuccaggugguc

SEQ ID NO: 3316 - RNA, 19 nt, Artificial Sequence
  Description of Artificial Sequence: Synthetic oligonucleotide
aucuuuuccuccagguggu

SEQ ID NO: 3317 - RNA, 19 nt, Artificial Sequence
  Description of Artificial Sequence: Synthetic oligonucleotide
gaucuuuuccuccaggugg

SEQ ID NO: 3318 - RNA, 19 nt, Artificial Sequence
  Description of Artificial Sequence: Synthetic oligonucleotide
ggaucuuuuccuccaggug

SEQ ID NO: 3319 - RNA, 19 nt, Artificial Sequence
  Description of Artificial Sequence: Synthetic oligonucleotide
gggaucuuuuccuccaggu

SEQ ID NO: 3320 - RNA, 19 nt, Artificial Sequence
  Description of Artificial Sequence: Synthetic oligonucleotide
ggggaucuuuuccuccagg

SEQ ID NO: 3321 - RNA, 19 nt, Artificial Sequence
  Description of Artificial Sequence: Synthetic oligonucleotide
cggggaucuuuuccuccag

SEQ ID NO: 3322 - RNA, 19 nt, Artificial Sequence
  Description of Artificial Sequence: Synthetic oligonucleotide
gcggggaucuuuuccucca

SEQ ID NO: 3323 - RNA, 19 nt, Artificial Sequence
  Description of Artificial Sequence: Synthetic oligonucleotide
ggcggggaucuuuuccucc

SEQ ID NO: 3324 - RNA, 19 nt, Artificial Sequence
  Description of Artificial Sequence: Synthetic oligonucleotide
gggcggggaucuuuuccuc

SEQ ID NO: 3325 - RNA, 19 nt, Artificial Sequence
  Description of Artificial Sequence: Synthetic oligonucleotide
agggcggggaucuuuuccu

SEQ ID NO: 3326 - RNA, 19 nt, Artificial Sequence
  Description of Artificial Sequence: Synthetic oligonucleotide
gagggcggggaucuuuucc

SEQ ID NO: 3327 - RNA, 19 nt, Artificial Sequence
  Description of Artificial Sequence: Synthetic oligonucleotide
ggagggcggggaucuuuuc

SEQ ID NO: 3328 - RNA, 19 nt, Artificial Sequence
  Description of Artificial Sequence: Synthetic oligonucleotide
uggagggcggggaucuuuu

SEQ ID NO: 3329 - RNA, 19 nt, Artificial Sequence
  Description of Artificial Sequence: Synthetic oligonucleotide
cuggagggcggggaucuuu

SEQ ID NO: 3330 - RNA, 19 nt, Artificial Sequence
  Description of Artificial Sequence: Synthetic oligonucleotide
acuggagggcggggaucuu

SEQ ID NO: 3331 - RNA, 19 nt, Artificial Sequence
  Description of Artificial Sequence: Synthetic oligonucleotide
uacuggagggcggggaucu

SEQ ID NO: 3332 - RNA, 19 nt, Artificial Sequence
  Description of Artificial Sequence: Synthetic oligonucleotide
guacuggagggcggggauc

SEQ ID NO: 3333 - RNA, 19 nt, Artificial Sequence
  Description of Artificial Sequence: Synthetic oligonucleotide
gguacuggagggcggggau

SEQ ID NO: 3334 - RNA, 19 nt, Artificial Sequence
  Description of Artificial Sequence: Synthetic oligonucleotide
ggguacuggagggcgggga

SEQ ID NO: 3335 - RNA, 19 nt, Artificial Sequence
  Description of Artificial Sequence: Synthetic oligonucleotide
gggguacuggagggcgggg

SEQ ID NO: 3336 - RNA, 19 nt, Artificial Sequence
  Description of Artificial Sequence: Synthetic oligonucleotide
ggggguacuggagggcggg

SEQ ID NO: 3337 - RNA, 19 nt, Artificial Sequence
  Description of Artificial Sequence: Synthetic oligonucleotide
gggggguacuggagggcgg

SEQ ID NO: 3338 - RNA, 19 nt, Artificial Sequence
  Description of Artificial Sequence: Synthetic oligonucleotide
agggggguacuggagggcg

SEQ ID NO: 3339 - RNA, 19 nt, Artificial Sequence
  Description of Artificial Sequence: Synthetic oligonucleotide
cagggggguacuggagggc

SEQ ID NO: 3340 - RNA, 19 nt, Artificial Sequence
  Description of Artificial Sequence: Synthetic oligonucleotide
ucagggggguacuggaggg

SEQ ID NO: 3341 - RNA, 19 nt, Artificial Sequence
  Description of Artificial Sequence: Synthetic oligonucleotide
uucagggggguacuggagg

SEQ ID NO: 3342 - RNA, 19 nt, Artificial Sequence
  Description of Artificial Sequence: Synthetic oligonucleotide
uuucagggggguacuggag

SEQ ID NO: 3343 - RNA, 19 nt, Artificial Sequence
  Description of Artificial Sequence: Synthetic oligonucleotide
uuuucagggggguacugga

SEQ ID NO: 3344 - RNA, 19 nt, Artificial Sequence
  Description of Artificial Sequence: Synthetic oligonucleotide
cuuuucagggggguacugg

SEQ ID NO: 3345 - RNA, 19 nt, Artificial Sequence
  Description of Artificial Sequence: Synthetic oligonucleotide
ucuuuucagggggguacug

SEQ ID NO: 3346 - RNA, 19 nt, Artificial Sequence
  Description of Artificial Sequence: Synthetic oligonucleotide
aucuuuucagggggguacu

SEQ ID NO: 3347 - RNA, 19 nt, Artificial Sequence
  Description of Artificial Sequence: Synthetic oligonucleotide
aaucuuuucagggggguac

SEQ ID NO: 3348 - RNA, 19 nt, Artificial Sequence
  Description of Artificial Sequence: Synthetic oligonucleotide
caaucuuuucaggggggua

SEQ ID NO: 3349 - RNA, 19 nt, Artificial Sequence
  Description of Artificial Sequence: Synthetic oligonucleotide
gcaaucuuuucaggggggu

SEQ ID NO: 3350 - RNA, 19 nt, Artificial Sequence
  Description of Artificial Sequence: Synthetic oligonucleotide
agcaaucuuuucagggggg

SEQ ID NO: 3351 - RNA, 19 nt, Artificial Sequence
  Description of Artificial Sequence: Synthetic oligonucleotide
aagcaaucuuuucaggggg

SEQ ID NO: 3352 - RNA, 19 nt, Artificial Sequence
  Description of Artificial Sequence: Synthetic oligonucleotide
gaagcaaucuuuucagggg

SEQ ID NO: 3353 - RNA, 19 nt, Artificial Sequence
  Description of Artificial Sequence: Synthetic oligonucleotide
agaagcaaucuuuucaggg

SEQ ID NO: 3354 - RNA, 19 nt, Artificial Sequence
  Description of Artificial Sequence: Synthetic oligonucleotide
cagaagcaaucuuuucagg

SEQ ID NO: 3355 - RNA, 19 nt, Artificial Sequence
  Description of Artificial Sequence: Synthetic oligonucleotide
ucagaagcaaucuuuucag

SEQ ID NO: 3356 - RNA, 19 nt, Artificial Sequence
  Description of Artificial Sequence: Synthetic oligonucleotide
cucagaagcaaucuuuuca

SEQ ID NO: 3357 - RNA, 19 nt, Artificial Sequence
  Description of Artificial Sequence: Synthetic oligonucleotide
gcucagaagcaaucuuuuc

SEQ ID NO: 3358 - RNA, 19 nt, Artificial Sequence
  Description of Artificial Sequence: Synthetic oligonucleotide
agcucagaagcaaucuuuu

SEQ ID NO: 3359 - RNA, 19 nt, Artificial Sequence
  Description of Artificial Sequence: Synthetic oligonucleotide
cagcucagaagcaaucuuu

SEQ ID NO: 3360 - RNA, 19 nt, Artificial Sequence
  Description of Artificial Sequence: Synthetic oligonucleotide
ucagcucagaagcaaucuu

SEQ ID NO: 3361 - RNA, 19 nt, Artificial Sequence
  Description of Artificial Sequence: Synthetic oligonucleotide
uucagcucagaagcaaucu

SEQ ID NO: 3362 - RNA, 19 nt, Artificial Sequence
  Description of Artificial Sequence: Synthetic oligonucleotide
cuucagcucagaagcaauc

SEQ ID NO: 3363 - RNA, 19 nt, Artificial Sequence
  Description of Artificial Sequence: Synthetic oligonucleotide
ccuucagcucagaagcaau

SEQ ID NO: 3364 - RNA, 19 nt, Artificial Sequence
  Description of Artificial Sequence: Synthetic oligonucleotide
uccuucagcucagaagcaa

SEQ ID NO: 3365 - RNA, 19 nt, Artificial Sequence
  Description of Artificial Sequence: Synthetic oligonucleotide
guccuucagcucagaagca

SEQ ID NO: 3366 - RNA, 19 nt, Artificial Sequence
  Description of Artificial Sequence: Synthetic oligonucleotide
uguccuucagcucagaagc

SEQ ID NO: 3367 - RNA, 19 nt, Artificial Sequence
  Description of Artificial Sequence: Synthetic oligonucleotide
guguccuucagcucagaag

SEQ ID NO: 3368 - RNA, 19 nt, Artificial Sequence
  Description of Artificial Sequence: Synthetic oligonucleotide
gguguccuucagcucagaa

SEQ ID NO: 3369 - RNA, 19 nt, Artificial Sequence
  Description of Artificial Sequence: Synthetic oligonucleotide
ugguguccuucagcucaga

SEQ ID NO: 3370 - RNA, 19 nt, Artificial Sequence
  Description of Artificial Sequence: Synthetic oligonucleotide
augguguccuucagcucag

SEQ ID NO: 3371 - RNA, 19 nt, Artificial Sequence
  Description of Artificial Sequence: Synthetic oligonucleotide
gaugguguccuucagcuca

SEQ ID NO: 3372 - RNA, 19 nt, Artificial Sequence
  Description of Artificial Sequence: Synthetic oligonucleotide
agaugguguccuucagcuc

SEQ ID NO: 3373 - RNA, 19 nt, Artificial Sequence
  Description of Artificial Sequence: Synthetic oligonucleotide
gagaugguguccuucagcu

SEQ ID NO: 3374 - RNA, 19 nt, Artificial Sequence
  Description of Artificial Sequence: Synthetic oligonucleotide
ggagaugguguccuucagc

SEQ ID NO: 3375 - RNA, 19 nt, Artificial Sequence
  Description of Artificial Sequence: Synthetic oligonucleotide
uggagaugguguccuucag

SEQ ID NO: 3376 - RNA, 19 nt, Artificial Sequence
  Description of Artificial Sequence: Synthetic oligonucleotide
guggagaugguguccuuca

SEQ ID NO: 3377 - RNA, 19 nt, Artificial Sequence
  Description of Artificial Sequence: Synthetic oligonucleotide
gguggagaugguguccuuc

SEQ ID NO: 3378 - RNA, 19 nt, Artificial Sequence
  Description of Artificial Sequence: Synthetic oligonucleotide
ggguggagaugguguccuu

SEQ ID NO: 3379 - RNA, 19 nt, Artificial Sequence
  Description of Artificial Sequence: Synthetic oligonucleotide
cggguggagaugguguccu

SEQ ID NO: 3380 - RNA, 19 nt, Artificial Sequence
  Description of Artificial Sequence: Synthetic oligonucleotide
gcggguggagauggugucc

SEQ ID NO: 3381 - RNA, 19 nt, Artificial Sequence
  Description of Artificial Sequence: Synthetic oligonucleotide
ggcggguggagaugguguc

SEQ ID NO: 3382 - RNA, 19 nt, Artificial Sequence
  Description of Artificial Sequence: Synthetic oligonucleotide
aggcggguggagauggugu

SEQ ID NO: 3383 - RNA, 19 nt, Artificial Sequence
  Description of Artificial Sequence: Synthetic oligonucleotide
gaggcggguggagauggug

SEQ ID NO: 3384 - RNA, 19 nt, Artificial Sequence
  Description of Artificial Sequence: Synthetic oligonucleotide
ggaggcggguggagauggu

SEQ ID NO: 3385 - RNA, 19 nt, Artificial Sequence
  Description of Artificial Sequence: Synthetic oligonucleotide
cggaggcggguggagaugg

SEQ ID NO: 3386 - RNA, 19 nt, Artificial Sequence
  Description of Artificial Sequence: Synthetic oligonucleotide
gcggaggcggguggagaug

SEQ ID NO: 3387 - RNA, 19 nt, Artificial Sequence
  Description of Artificial Sequence: Synthetic oligonucleotide
ugcggaggcggguggagau

SEQ ID NO: 3388 - RNA, 19 nt, Artificial Sequence
  Description of Artificial Sequence: Synthetic oligonucleotide
cugcggaggcggguggaga

SEQ ID NO: 3389 - RNA, 19 nt, Artificial Sequence
  Description of Artificial Sequence: Synthetic oligonucleotide
acugcggaggcggguggag

SEQ ID NO: 3390 - RNA, 19 nt, Artificial Sequence
  Description of Artificial Sequence: Synthetic oligonucleotide
cacugcggaggcgggugga

SEQ ID NO: 3391 - RNA, 19 nt, Artificial Sequence
  Description of Artificial Sequence: Synthetic oligonucleotide
gcacugcggaggcgggugg

SEQ ID NO: 3392 - RNA, 19 nt, Artificial Sequence
  Description of Artificial Sequence: Synthetic oligonucleotide
ggcacugcggaggcgggug

SEQ ID NO: 3393 - RNA, 19 nt, Artificial Sequence
  Description of Artificial Sequence: Synthetic oligonucleotide
uggcacugcggaggcgggu

SEQ ID NO: 3394 - RNA, 19 nt, Artificial Sequence
  Description of Artificial Sequence: Synthetic oligonucleotide
cuggcacugcggaggcggg

SEQ ID NO: 3395 - RNA, 19 nt, Artificial Sequence
  Description of Artificial Sequence: Synthetic oligonucleotide
ucuggcacugcggaggcgg

SEQ ID NO: 3396 - RNA, 19 nt, Artificial Sequence
  Description of Artificial Sequence: Synthetic oligonucleotide
uucuggcacugcggaggcg

SEQ ID NO: 3397 - RNA, 19 nt, Artificial Sequence
  Description of Artificial Sequence: Synthetic oligonucleotide
uuucuggcacugcggaggc

SEQ ID NO: 3398 - RNA, 19 nt, Artificial Sequence
  Description of Artificial Sequence: Synthetic oligonucleotide
guuucuggcacugcggagg

SEQ ID NO: 3399 - RNA, 19 nt, Artificial Sequence
  Description of Artificial Sequence: Synthetic oligonucleotide
uguuucuggcacugcggag

SEQ ID NO: 3400 - RNA, 19 nt, Artificial Sequence
  Description of Artificial Sequence: Synthetic oligonucleotide
cuguuucuggcacugcgga

SEQ ID NO: 3401 - RNA, 19 nt, Artificial Sequence
  Description of Artificial Sequence: Synthetic oligonucleotide
gcuguuucuggcacugcgg

SEQ ID NO: 3402 - RNA, 19 nt, Artificial Sequence
  Description of Artificial Sequence: Synthetic oligonucleotide
ugcuguuucuggcacugcg

SEQ ID NO: 3403 - RNA, 19 nt, Artificial Sequence
  Description of Artificial Sequence: Synthetic oligonucleotide
augcuguuucuggcacugc

SEQ ID NO: 3404 - RNA, 19 nt, Artificial Sequence
  Description of Artificial Sequence: Synthetic oligonucleotide
gaugcuguuucuggcacug

SEQ ID NO: 3405 - RNA, 19 nt, Artificial Sequence
  Description of Artificial Sequence: Synthetic oligonucleotide
ugaugcuguuucuggcacu

SEQ ID NO: 3406 - RNA, 19 nt, Artificial Sequence
  Description of Artificial Sequence: Synthetic oligonucleotide
cugaugcuguuucuggcac

SEQ ID NO: 3407 - RNA, 19 nt, Artificial Sequence
  Description of Artificial Sequence: Synthetic oligonucleotide
gcugaugcuguuucuggca

SEQ ID NO: 3408 - RNA, 19 nt, Artificial Sequence
  Description of Artificial Sequence: Synthetic oligonucleotide
cgcugaugcuguuucuggc

SEQ ID NO: 3409 - RNA, 19 nt, Artificial Sequence
  Description of Artificial Sequence: Synthetic oligonucleotide
acgcugaugcuguuucugg

SEQ ID NO: 3410 - RNA, 19 nt, Artificial Sequence
  Description of Artificial Sequence: Synthetic oligonucleotide
aacgcugaugcuguuucug

SEQ ID NO: 3411 - RNA, 19 nt, Artificial Sequence
  Description of Artificial Sequence: Synthetic oligonucleotide
gaacgcugaugcuguuucu

SEQ ID NO: 3412 - RNA, 19 nt, Artificial Sequence
  Description of Artificial Sequence: Synthetic oligonucleotide
ggaacgcugaugcuguuuc

SEQ ID NO: 3413 - RNA, 19 nt, Artificial Sequence
  Description of Artificial Sequence: Synthetic oligonucleotide
gggaacgcugaugcuguuu

SEQ ID NO: 3414 - RNA, 19 nt, Artificial Sequence
  Description of Artificial Sequence: Synthetic oligonucleotide
ugggaacgcugaugcuguu

SEQ ID NO: 3415 - RNA, 19 nt, Artificial Sequence
  Description of Artificial Sequence: Synthetic oligonucleotide
augggaacgcugaugcugu

SEQ ID NO: 3416 - RNA, 19 nt, Artificial Sequence
  Description of Artificial Sequence: Synthetic oligonucleotide
gaugggaacgcugaugcug

SEQ ID NO: 3417 - RNA, 19 nt, Artificial Sequence
  Description of Artificial Sequence: Synthetic oligonucleotide
cgaugggaacgcugaugcu

SEQ ID NO: 3418 - RNA, 19 nt, Artificial Sequence
  Description of Artificial Sequence: Synthetic oligonucleotide
gcgaugggaacgcugaugc

SEQ ID NO: 3419 - RNA, 19 nt, Artificial Sequence
  Description of Artificial Sequence: Synthetic oligonucleotide
cgcgaugggaacgcugaug

SEQ ID NO: 3420 - RNA, 19 nt, Artificial Sequence
  Description of Artificial Sequence: Synthetic oligonucleotide
ucgcgaugggaacgcugau

SEQ ID NO: 3421 - RNA, 19 nt, Artificial Sequence
  Description of Artificial Sequence: Synthetic oligonucleotide
cucgcgaugggaacgcuga

SEQ ID NO: 3422 - RNA, 19 nt, Artificial Sequence
  Description of Artificial Sequence: Synthetic oligonucleotide
gcucgcgaugggaacgcug

SEQ ID NO: 3423 - RNA, 19 nt, Artificial Sequence
  Description of Artificial Sequence: Synthetic oligonucleotide
ugcucgcgaugggaacgcu

SEQ ID NO: 3424 - RNA, 19 nt, Artificial Sequence
  Description of Artificial Sequence: Synthetic oligonucleotide
gugcucgcgaugggaacgc

SEQ ID NO: 3425 - RNA, 19 nt, Artificial Sequence
  Description of Artificial Sequence: Synthetic oligonucleotide
agugcucgcgaugggaacg

SEQ ID NO: 3426 - RNA, 19 nt, Artificial Sequence
  Description of Artificial Sequence: Synthetic oligonucleotide
aagugcucgcgaugggaac

SEQ ID NO: 3427 - RNA, 19 nt, Artificial Sequence
  Description of Artificial Sequence: Synthetic oligonucleotide
gaagugcucgcgaugggaa

SEQ ID NO: 3428 - RNA, 19 nt, Artificial Sequence
  Description of Artificial Sequence: Synthetic oligonucleotide
ugaagugcucgcgauggga

SEQ ID NO: 3429 - RNA, 19 nt, Artificial Sequence
  Description of Artificial Sequence: Synthetic oligonucleotide
cugaagugcucgcgauggg

SEQ ID NO: 3430 - RNA, 19 nt, Artificial Sequence
  Description of Artificial Sequence: Synthetic oligonucleotide
ucugaagugcucgcgaugg

SEQ ID NO: 3431 - RNA, 19 nt, Artificial Sequence
  Description of Artificial Sequence: Synthetic oligonucleotide
gucugaagugcucgcgaug

SEQ ID NO: 3432 - RNA, 19 nt, Artificial Sequence
  Description of Artificial Sequence: Synthetic oligonucleotide
ugucugaagugcucgcgau

SEQ ID NO: 3433 - RNA, 19 nt, Artificial Sequence
  Description of Artificial Sequence: Synthetic oligonucleotide
uugucugaagugcucgcga

SEQ ID NO: 3434 - RNA, 19 nt, Artificial Sequence
  Description of Artificial Sequence: Synthetic oligonucleotide
cuugucugaagugcucgcg

SEQ ID NO: 3435 - RNA, 19 nt, Artificial Sequence
  Description of Artificial Sequence: Synthetic oligonucleotide
ccuugucugaagugcucgc

SEQ ID NO: 3436 - RNA, 19 nt, Artificial Sequence
  Description of Artificial Sequence: Synthetic oligonucleotide
accuugucugaagugcucg

SEQ ID NO: 3437 - RNA, 19 nt, Artificial Sequence
  Description of Artificial Sequence: Synthetic oligonucleotide
gaccuugucugaagugcuc

SEQ ID NO: 3438 - RNA, 19 nt, Artificial Sequence
  Description of Artificial Sequence: Synthetic oligonucleotide
ggaccuugucugaagugcu

SEQ ID NO: 3439 - RNA, 19 nt, Artificial Sequence
  Description of Artificial Sequence: Synthetic oligonucleotide
aggaccuugucugaagugc

SEQ ID NO: 3440 - RNA, 19 nt, Artificial Sequence
  Description of Artificial Sequence: Synthetic oligonucleotide
caggaccuugucugaagug

SEQ ID NO: 3441 - RNA, 19 nt, Artificial Sequence
  Description of Artificial Sequence: Synthetic oligonucleotide
ccaggaccuugucugaagu

SEQ ID NO: 3442 - RNA, 19 nt, Artificial Sequence
  Description of Artificial Sequence: Synthetic oligonucleotide
cccaggaccuugucugaag

SEQ ID NO: 3443 - RNA, 19 nt, Artificial Sequence
  Description of Artificial Sequence: Synthetic oligonucleotide
ccccaggaccuugucugaa

SEQ ID NO: 3444 - RNA, 19 nt, Artificial Sequence
  Description of Artificial Sequence: Synthetic oligonucleotide
cccccaggaccuugucuga

SEQ ID NO: 3445 - RNA, 19 nt, Artificial Sequence
  Description of Artificial Sequence: Synthetic oligonucleotide
gcccccaggaccuugucug

SEQ ID NO: 3446 - RNA, 19 nt, Artificial Sequence
  Description of Artificial Sequence: Synthetic oligonucleotide
ggcccccaggaccuugucu

SEQ ID NO: 3447 - RNA, 19 nt, Artificial Sequence
  Description of Artificial Sequence: Synthetic oligonucleotide
cggcccccaggaccuuguc

SEQ ID NO: 3448 - RNA, 19 nt, Artificial Sequence
  Description of Artificial Sequence: Synthetic oligonucleotide
gcggcccccaggaccuugu

SEQ ID NO: 3449 - RNA, 19 nt, Artificial Sequence
  Description of Artificial Sequence: Synthetic oligonucleotide
agcggcccccaggaccuug

SEQ ID NO: 3450 - RNA, 19 nt, Artificial Sequence
  Description of Artificial Sequence: Synthetic oligonucleotide
aagcggcccccaggaccuu

SEQ ID NO: 3451 - RNA, 19 nt, Artificial Sequence
  Description of Artificial Sequence: Synthetic oligonucleotide
aaagcggcccccaggaccu

SEQ ID NO: 3452 - RNA, 19 nt, Artificial Sequence
  Description of Artificial Sequence: Synthetic oligonucleotide
caaagcggcccccaggacc

SEQ ID NO: 3453 - RNA, 19 nt, Artificial Sequence
  Description of Artificial Sequence: Synthetic oligonucleotide
ccaaagcggcccccaggac

SEQ ID NO: 3454 - RNA, 19 nt, Artificial Sequence
  Description of Artificial Sequence: Synthetic oligonucleotide
gccaaagcggcccccagga

SEQ ID NO: 3455 - RNA, 19 nt, Artificial Sequence
  Description of Artificial Sequence: Synthetic oligonucleotide
ggccaaagcggcccccagg

SEQ ID NO: 3456 - RNA, 19 nt, Artificial Sequence
  Description of Artificial Sequence: Synthetic oligonucleotide
cggccaaagcggcccccag

SEQ ID NO: 3457 - RNA, 19 nt, Artificial Sequence
  Description of Artificial Sequence: Synthetic oligonucleotide
ccggccaaagcggccccca

SEQ ID NO: 3458 - RNA, 19 nt, Artificial Sequence
  Description of Artificial Sequence: Synthetic oligonucleotide
cccggccaaagcggccccc

SEQ ID NO: 3459 - RNA, 19 nt, Artificial Sequence
  Description of Artificial Sequence: Synthetic oligonucleotide
acccggccaaagcggcccc

SEQ ID NO: 3460 - RNA, 19 nt, Artificial Sequence
  Description of Artificial Sequence: Synthetic oligonucleotide
cacccggccaaagcggccc

SEQ ID NO: 3461 - RNA, 19 nt, Artificial Sequence
  Description of Artificial Sequence: Synthetic oligonucleotide
gcacccggccaaagcggcc

SEQ ID NO: 3462 - RNA, 19 nt, Artificial Sequence
  Description of Artificial Sequence: Synthetic oligonucleotide
cgcacccggccaaagcggc

SEQ ID NO: 3463 - RNA, 19 nt, Artificial Sequence
  Description of Artificial Sequence: Synthetic oligonucleotide
ucgcacccggccaaagcgg

SEQ ID NO: 3464 - RNA, 19 nt, Artificial Sequence
  Description of Artificial Sequence: Synthetic oligonucleotide
cucgcacccggccaaagcg

SEQ ID NO: 3465 - RNA, 19 nt, Artificial Sequence
  Description of Artificial Sequence: Synthetic oligonucleotide
gcucgcacccggccaaagc

SEQ ID NO: 3466 - RNA, 19 nt, Artificial Sequence
  Description of Artificial Sequence: Synthetic oligonucleotide
agcucgcacccggccaaag

SEQ ID NO: 3467 - RNA, 19 nt, Artificial Sequence
  Description of Artificial Sequence: Synthetic oligonucleotide
aagcucgcacccggccaaa

SEQ ID NO: 3468 - RNA, 19 nt, Artificial Sequence
  Description of Artificial Sequence: Synthetic oligonucleotide
caagcucgcacccggccaa

SEQ ID NO: 3469 - RNA, 19 nt, Artificial Sequence
  Description of Artificial Sequence: Synthetic oligonucleotide
gcaagcucgcacccggcca

SEQ ID NO: 3470 - RNA, 19 nt, Artificial Sequence
  Description of Artificial Sequence: Synthetic oligonucleotide
ggcaagcucgcacccggcc

SEQ ID NO: 3471 - RNA, 19 nt, Artificial Sequence
  Description of Artificial Sequence: Synthetic oligonucleotide
aggcaagcucgcacccggc

SEQ ID NO: 3472 - RNA, 19 nt, Artificial Sequence
  Description of Artificial Sequence: Synthetic oligonucleotide
caggcaagcucgcacccgg

SEQ ID NO: 3473 - RNA, 19 nt, Artificial Sequence
  Description of Artificial Sequence: Synthetic oligonucleotide
ccaggcaagcucgcacccg

SEQ ID NO: 3474 - RNA, 19 nt, Artificial Sequence
  Description of Artificial Sequence: Synthetic oligonucleotide
cccaggcaagcucgcaccc

SEQ ID NO: 3475 - RNA, 19 nt, Artificial Sequence
  Description of Artificial Sequence: Synthetic oligonucleotide
ccccaggcaagcucgcacc

SEQ ID NO: 3476 - RNA, 19 nt, Artificial Sequence
  Description of Artificial Sequence: Synthetic oligonucleotide
cccccaggcaagcucgcac

SEQ ID NO: 3477 - RNA, 19 nt, Artificial Sequence
  Description of Artificial Sequence: Synthetic oligonucleotide
ccccccaggcaagcucgca

SEQ ID NO: 3478 - RNA, 19 nt, Artificial Sequence
  Description of Artificial Sequence: Synthetic oligonucleotide
accccccaggcaagcucgc

SEQ ID NO: 3479 - RNA, 19 nt, Artificial Sequence
  Description of Artificial Sequence: Synthetic oligonucleotide
caccccccaggcaagcucg

SEQ ID NO: 3480 - RNA, 19 nt, Artificial Sequence
  Description of Artificial Sequence: Synthetic oligonucleotide
ccaccccccaggcaagcuc

SEQ ID NO: 3481 - RNA, 19 nt, Artificial Sequence
  Description of Artificial Sequence: Synthetic oligonucleotide
gccaccccccaggcaagcu

SEQ ID NO: 3482 - RNA, 19 nt, Artificial Sequence
  Description of Artificial Sequence: Synthetic oligonucleotide
ggccaccccccaggcaagc

SEQ ID NO: 3483 - RNA, 19 nt, Artificial Sequence
  Description of Artificial Sequence: Synthetic oligonucleotide
uggccaccccccaggcaag

SEQ ID NO: 3484 - RNA, 19 nt, Artificial Sequence
  Description of Artificial Sequence: Synthetic oligonucleotide
cuggccaccccccaggcaa

SEQ ID NO: 3485 - RNA, 19 nt, Artificial Sequence
  Description of Artificial Sequence: Synthetic oligonucleotide
ucuggccaccccccaggca

SEQ ID NO: 3486 - RNA, 19 nt, Artificial Sequence
  Description of Artificial Sequence: Synthetic oligonucleotide
cucuggccaccccccaggc

SEQ ID NO: 3487 - RNA, 19 nt, Artificial Sequence
  Description of Artificial Sequence: Synthetic oligonucleotide
ucucuggccaccccccagg

SEQ ID NO: 3488 - RNA, 19 nt, Artificial Sequence
  Description of Artificial Sequence: Synthetic oligonucleotide
gucucuggccaccccccag

SEQ ID NO: 3489 - RNA, 19 nt, Artificial Sequence
  Description of Artificial Sequence: Synthetic oligonucleotide
ugucucuggccacccccca

SEQ ID NO: 3490 - RNA, 19 nt, Artificial Sequence
  Description of Artificial Sequence: Synthetic oligonucleotide
gugucucuggccacccccc

SEQ ID NO: 3491 - RNA, 19 nt, Artificial Sequence
  Description of Artificial Sequence: Synthetic oligonucleotide
agugucucuggccaccccc

SEQ ID NO: 3492 - RNA, 19 nt, Artificial Sequence
  Description of Artificial Sequence: Synthetic oligonucleotide
cagugucucuggccacccc

SEQ ID NO: 3493 - RNA, 19 nt, Artificial Sequence
  Description of Artificial Sequence: Synthetic oligonucleotide
gcagugucucuggccaccc

SEQ ID NO: 3494 - RNA, 19 nt, Artificial Sequence
  Description of Artificial Sequence: Synthetic oligonucleotide
cgcagugucucuggccacc

SEQ ID NO: 3495 - RNA, 19 nt, Artificial Sequence
  Description of Artificial Sequence: Synthetic oligonucleotide
ccgcagugucucuggccac

SEQ ID NO: 3496 - RNA, 19 nt, Artificial Sequence
  Description of Artificial Sequence: Synthetic oligonucleotide
uccgcagugucucuggcca

SEQ ID NO: 3497 - RNA, 19 nt, Artificial Sequence
  Description of Artificial Sequence: Synthetic oligonucleotide
uuccgcagugucucuggcc

SEQ ID NO: 3498 - RNA, 19 nt, Artificial Sequence
  Description of Artificial Sequence: Synthetic oligonucleotide
auuccgcagugucucuggc

SEQ ID NO: 3499 - RNA, 19 nt, Artificial Sequence
  Description of Artificial Sequence: Synthetic oligonucleotide
aauuccgcagugucucugg

SEQ ID NO: 3500 - RNA, 19 nt, Artificial Sequence
  Description of Artificial Sequence: Synthetic oligonucleotide
aaauuccgcagugucucug

SEQ ID NO: 3501 - RNA, 19 nt, Artificial Sequence
  Description of Artificial Sequence: Synthetic oligonucleotide
caaauuccgcagugucucu

SEQ ID NO: 3502 - RNA, 19 nt, Artificial Sequence
  Description of Artificial Sequence: Synthetic oligonucleotide
gcaaauuccgcagugucuc

SEQ ID NO: 3503 - RNA, 19 nt, Artificial Sequence
  Description of Artificial Sequence: Synthetic oligonucleotide
agcaaauuccgcagugucu

SEQ ID NO: 3504 - RNA, 19 nt, Artificial Sequence
  Description of Artificial Sequence: Synthetic oligonucleotide
cagcaaauuccgcaguguc

SEQ ID NO: 3505 - RNA, 19 nt, Artificial Sequence
  Description of Artificial Sequence: Synthetic oligonucleotide
gcagcaaauuccgcagugu

SEQ ID NO: 3506 - RNA, 19 nt, Artificial Sequence
  Description of Artificial Sequence: Synthetic oligonucleotide
ggcagcaaauuccgcagug

SEQ ID NO: 3507 - RNA, 19 nt, Artificial Sequence
  Description of Artificial Sequence: Synthetic oligonucleotide
uggcagcaaauuccgcagu

SEQ ID NO: 3508 - RNA, 19 nt, Artificial Sequence
  Description of Artificial Sequence: Synthetic oligonucleotide
uuggcagcaaauuccgcag

SEQ ID NO: 3509 - RNA, 19 nt, Artificial Sequence
  Description of Artificial Sequence: Synthetic oligonucleotide
guuggcagcaaauuccgca

SEQ ID NO: 3510 - RNA, 19 nt, Artificial Sequence
  Description of Artificial Sequence: Synthetic oligonucleotide
uguuggcagcaaauuccgc

SEQ ID NO: 3511 - RNA, 19 nt, Artificial Sequence
  Description of Artificial Sequence: Synthetic oligonucleotide
guguuggcagcaaauuccg

SEQ ID NO: 3512 - RNA, 19 nt, Artificial Sequence
  Description of Artificial Sequence: Synthetic oligonucleotide
aguguuggcagcaaauucc

SEQ ID NO: 3513 - RNA, 19 nt, Artificial Sequence
  Description of Artificial Sequence: Synthetic oligonucleotide
gaguguuggcagcaaauuc

SEQ ID NO: 3514 - RNA, 19 nt, Artificial Sequence
  Description of Artificial Sequence: Synthetic oligonucleotide
cgaguguuggcagcaaauu

SEQ ID NO: 3515 - RNA, 19 nt, Artificial Sequence
  Description of Artificial Sequence: Synthetic oligonucleotide
ucgaguguuggcagcaaau

SEQ ID NO: 3516 - RNA, 19 nt, Artificial Sequence
  Description of Artificial Sequence: Synthetic oligonucleotide
cucgaguguuggcagcaaa

SEQ ID NO: 3517 - RNA, 19 nt, Artificial Sequence
  Description of Artificial Sequence: Synthetic oligonucleotide
gcucgaguguuggcagcaa

SEQ ID NO: 3518 - RNA, 19 nt, Artificial Sequence
  Description of Artificial Sequence: Synthetic oligonucleotide
agcucgaguguuggcagca

SEQ ID NO: 3519 - RNA, 19 nt, Artificial Sequence
  Description of Artificial Sequence: Synthetic oligonucleotide
cagcucgaguguuggcagc

SEQ ID NO: 3520 - RNA, 19 nt, Artificial Sequence
  Description of Artificial Sequence: Synthetic oligonucleotide
ccagcucgaguguuggcag

SEQ ID NO: 3521 - RNA, 19 nt, Artificial Sequence
  Description of Artificial Sequence: Synthetic oligonucleotide
gccagcucgaguguuggca

SEQ ID NO: 3522 - RNA, 19 nt, Artificial Sequence
  Description of Artificial Sequence: Synthetic oligonucleotide
ggccagcucgaguguuggc

SEQ ID NO: 3523 - RNA, 19 nt, Artificial Sequence
  Description of Artificial Sequence: Synthetic oligonucleotide
cggccagcucgaguguugg

SEQ ID NO: 3524 - RNA, 19 nt, Artificial Sequence
  Description of Artificial Sequence: Synthetic oligonucleotide
ucggccagcucgaguguug

SEQ ID NO: 3525 - RNA, 19 nt, Artificial Sequence
  Description of Artificial Sequence: Synthetic oligonucleotide
gucggccagcucgaguguu

SEQ ID NO: 3526 - RNA, 19 nt, Artificial Sequence
  Description of Artificial Sequence: Synthetic oligonucleotide
agucggccagcucgagugu

SEQ ID NO: 3527 - RNA, 19 nt, Artificial Sequence
  Description of Artificial Sequence: Synthetic oligonucleotide
cagucggccagcucgagug

SEQ ID NO: 3528 - RNA, 19 nt, Artificial Sequence
  Description of Artificial Sequence: Synthetic oligonucleotide
ccagucggccagcucgagu

SEQ ID NO: 3529 - RNA, 19 nt, Artificial Sequence
  Description of Artificial Sequence: Synthetic oligonucleotide
gccagucggccagcucgag

SEQ ID NO: 3530 - RNA, 19 nt, Artificial Sequence
  Description of Artificial Sequence: Synthetic oligonucleotide
agccagucggccagcucga

SEQ ID NO: 3531 - RNA, 19 nt, Artificial Sequence
  Description of Artificial Sequence: Synthetic oligonucleotide
aagccagucggccagcucg

SEQ ID NO: 3532 - RNA, 19 nt, Artificial Sequence
  Description of Artificial Sequence: Synthetic oligonucleotide
gaagccagucggccagcuc

SEQ ID NO: 3533 - RNA, 19 nt, Artificial Sequence
  Description of Artificial Sequence: Synthetic oligonucleotide
agaagccagucggccagcu

SEQ ID NO: 3534 - RNA, 19 nt, Artificial Sequence
  Description of Artificial Sequence: Synthetic oligonucleotide
cagaagccagucggccagc

SEQ ID NO: 3535 - RNA, 19 nt, Artificial Sequence
  Description of Artificial Sequence: Synthetic oligonucleotide
ccagaagccagucggccag

SEQ ID NO: 3536 - RNA, 19 nt, Artificial Sequence
  Description of Artificial Sequence: Synthetic oligonucleotide
uccagaagccagucggcca

SEQ ID NO: 3537 - RNA, 19 nt, Artificial Sequence
  Description of Artificial Sequence: Synthetic oligonucleotide
cuccagaagccagucggcc

SEQ ID NO: 3538 - RNA, 19 nt, Artificial Sequence
  Description of Artificial Sequence: Synthetic oligonucleotide
ccuccagaagccagucggc

SEQ ID NO: 3539 - RNA, 19 nt, Artificial Sequence
  Description of Artificial Sequence: Synthetic oligonucleotide
cccuccagaagccagucgg

SEQ ID NO: 3540 - RNA, 19 nt, Artificial Sequence
  Description of Artificial Sequence: Synthetic oligonucleotide
ccccuccagaagccagucg

SEQ ID NO: 3541 - RNA, 19 nt, Artificial Sequence
  Description of Artificial Sequence: Synthetic oligonucleotide
gccccuccagaagccaguc

SEQ ID NO: 3542 - RNA, 19 nt, Artificial Sequence
  Description of Artificial Sequence: Synthetic oligonucleotide
ggccccuccagaagccagu

SEQ ID NO: 3543 - RNA, 19 nt, Artificial Sequence
  Description of Artificial Sequence: Synthetic oligonucleotide
cggccccuccagaagccag

SEQ ID NO: 3544 - RNA, 19 nt, Artificial Sequence
  Description of Artificial Sequence: Synthetic oligonucleotide
ucggccccuccagaagcca

SEQ ID NO: 3545 - RNA, 19 nt, Artificial Sequence
  Description of Artificial Sequence: Synthetic oligonucleotide
gucggccccuccagaagcc

SEQ ID NO: 3546 - RNA, 19 nt, Artificial Sequence
  Description of Artificial Sequence: Synthetic oligonucleotide
agucggccccuccagaagc

SEQ ID NO: 3547 - RNA, 19 nt, Artificial Sequence
  Description of Artificial Sequence: Synthetic oligonucleotide
aagucggccccuccagaag

SEQ ID NO: 3548 - RNA, 19 nt, Artificial Sequence
  Description of Artificial Sequence: Synthetic oligonucleotide
caagucggccccuccagaa

SEQ ID NO: 3549 - RNA, 19 nt, Artificial Sequence
  Description of Artificial Sequence: Synthetic oligonucleotide
ccaagucggccccuccaga

SEQ ID NO: 3550 - RNA, 19 nt, Artificial Sequence
  Description of Artificial Sequence: Synthetic oligonucleotide
gccaagucggccccuccag

SEQ ID NO: 3551 - RNA, 19 nt, Artificial Sequence
  Description of Artificial Sequence: Synthetic oligonucleotide
ggccaagucggccccucca

SEQ ID NO: 3552 - RNA, 19 nt, Artificial Sequence
  Description of Artificial Sequence: Synthetic oligonucleotide
aggccaagucggccccucc

SEQ ID NO: 3553 - RNA, 19 nt, Artificial Sequence
  Description of Artificial Sequence: Synthetic oligonucleotide
aaggccaagucggccccuc

SEQ ID NO: 3554 - RNA, 19 nt, Artificial Sequence
  Description of Artificial Sequence: Synthetic oligonucleotide
caaggccaagucggccccu

SEQ ID NO: 3555 - RNA, 19 nt, Artificial Sequence
  Description of Artificial Sequence: Synthetic oligonucleotide
ccaaggccaagucggcccc

SEQ ID NO: 3556 - RNA, 19 nt, Artificial Sequence
  Description of Artificial Sequence: Synthetic oligonucleotide
cccaaggccaagucggccc

SEQ ID NO: 3557 - RNA, 19 nt, Artificial Sequence
  Description of Artificial Sequence: Synthetic oligonucleotide
gcccaaggccaagucggcc

SEQ ID NO: 3558 - RNA, 19 nt, Artificial Sequence
  Description of Artificial Sequence: Synthetic oligonucleotide
ugcccaaggccaagucggc

SEQ ID NO: 3559 - RNA, 19 nt, Artificial Sequence
  Description of Artificial Sequence: Synthetic oligonucleotide
cugcccaaggccaagucgg

SEQ ID NO: 3560 - RNA, 19 nt, Artificial Sequence
  Description of Artificial Sequence: Synthetic oligonucleotide
gcugcccaaggccaagucg

SEQ ID NO: 3561 - RNA, 19 nt, Artificial Sequence
  Description of Artificial Sequence: Synthetic oligonucleotide
ugcugcccaaggccaaguc

SEQ ID NO: 3562 - RNA, 19 nt, Artificial Sequence
  Description of Artificial Sequence: Synthetic oligonucleotide
augcugcccaaggccaagu

SEQ ID NO: 3563 - RNA, 19 nt, Artificial Sequence
  Description of Artificial Sequence: Synthetic oligonucleotide
aaugcugcccaaggccaag

SEQ ID NO: 3564 - RNA, 19 nt, Artificial Sequence
  Description of Artificial Sequence: Synthetic oligonucleotide
caaugcugcccaaggccaa

SEQ ID NO: 3565 - RNA, 19 nt, Artificial Sequence
  Description of Artificial Sequence: Synthetic oligonucleotide
ucaaugcugcccaaggcca

SEQ ID NO: 3566 - RNA, 19 nt, Artificial Sequence
  Description of Artificial Sequence: Synthetic oligonucleotide
cucaaugcugcccaaggcc

SEQ ID NO: 3567 - RNA, 19 nt, Artificial Sequence
  Description of Artificial Sequence: Synthetic oligonucleotide
ucucaaugcugcccaaggc

SEQ ID NO: 3568 - RNA, 19 nt, Artificial Sequence
  Description of Artificial Sequence: Synthetic oligonucleotide
uucucaaugcugcccaagg

SEQ ID NO: 3569 - RNA, 19 nt, Artificial Sequence
  Description of Artificial Sequence: Synthetic oligonucleotide
cuucucaaugcugcccaag

SEQ ID NO: 3570 - RNA, 19 nt, Artificial Sequence
  Description of Artificial Sequence: Synthetic oligonucleotide
ccuucucaaugcugcccaa

SEQ ID NO: 3571 - RNA, 19 nt, Artificial Sequence
  Description of Artificial Sequence: Synthetic oligonucleotide
accuucucaaugcugccca

SEQ ID NO: 3572 - RNA, 19 nt, Artificial Sequence
  Description of Artificial Sequence: Synthetic oligonucleotide
caccuucucaaugcugccc

SEQ ID NO: 3573 - RNA, 19 nt, Artificial Sequence
  Description of Artificial Sequence: Synthetic oligonucleotide
ccaccuucucaaugcugcc

SEQ ID NO: 3574 - RNA, 19 nt, Artificial Sequence
  Description of Artificial Sequence: Synthetic oligonucleotide
accaccuucucaaugcugc

SEQ ID NO: 3575 - RNA, 19 nt, Artificial Sequence
  Description of Artificial Sequence: Synthetic oligonucleotide
caccaccuucucaaugcug

SEQ ID NO: 3576 - RNA, 19 nt, Artificial Sequence
  Description of Artificial Sequence: Synthetic oligonucleotide
ccaccaccuucucaaugcu

SEQ ID NO: 3577 - RNA, 19 nt, Artificial Sequence
  Description of Artificial Sequence: Synthetic oligonucleotide
uccaccaccuucucaaugc

SEQ ID NO: 3578 - RNA, 19 nt, Artificial Sequence
  Description of Artificial Sequence: Synthetic oligonucleotide
cuccaccaccuucucaaug

SEQ ID NO: 3579 - RNA, 19 nt, Artificial Sequence
  Description of Artificial Sequence: Synthetic oligonucleotide
acuccaccaccuucucaau

SEQ ID NO: 3580 - RNA, 19 nt, Artificial Sequence
  Description of Artificial Sequence: Synthetic oligonucleotide
uacuccaccaccuucucaa

SEQ ID NO: 3581 - RNA, 19 nt, Artificial Sequence
  Description of Artificial Sequence: Synthetic oligonucleotide
guacuccaccaccuucuca

SEQ ID NO: 3582 - RNA, 19 nt, Artificial Sequence
  Description of Artificial Sequence: Synthetic oligonucleotide
gguacuccaccaccuucuc

SEQ ID NO: 3583 - RNA, 19 nt, Artificial Sequence
  Description of Artificial Sequence: Synthetic oligonucleotide
agguacuccaccaccuucu

SEQ ID NO: 3584 - RNA, 19 nt, Artificial Sequence
  Description of Artificial Sequence: Synthetic oligonucleotide
gagguacuccaccaccuuc

SEQ ID NO: 3585 - RNA, 19 nt, Artificial Sequence
  Description of Artificial Sequence: Synthetic oligonucleotide
ggagguacuccaccaccuu

SEQ ID NO: 3586 - RNA, 19 nt, Artificial Sequence
  Description of Artificial Sequence: Synthetic oligonucleotide
aggagguacuccaccaccu

SEQ ID NO: 3587 - RNA, 19 nt, Artificial Sequence
  Description of Artificial Sequence: Synthetic oligonucleotide
gaggagguacuccaccacc

SEQ ID NO: 3588 - RNA, 19 nt, Artificial Sequence
  Description of Artificial Sequence: Synthetic oligonucleotide
ggaggagguacuccaccac

SEQ ID NO: 3589 - RNA, 19 nt, Artificial Sequence
  Description of Artificial Sequence: Synthetic oligonucleotide
gggaggagguacuccacca

SEQ ID NO: 3590 - RNA, 19 nt, Artificial Sequence
  Description of Artificial Sequence: Synthetic oligonucleotide
agggaggagguacuccacc

SEQ ID NO: 3591 - RNA, 19 nt, Artificial Sequence
  Description of Artificial Sequence: Synthetic oligonucleotide
gagggaggagguacuccac

SEQ ID NO: 3592 - RNA, 19 nt, Artificial Sequence
  Description of Artificial Sequence: Synthetic oligonucleotide
ggagggaggagguacucca

SEQ ID NO: 3593 - RNA, 19 nt, Artificial Sequence
  Description of Artificial Sequence: Synthetic oligonucleotide
uggagggaggagguacucc

SEQ ID NO: 3594 - RNA, 19 nt, Artificial Sequence
  Description of Artificial Sequence: Synthetic oligonucleotide
cuggagggaggagguacuc

SEQ ID NO: 3595 - RNA, 19 nt, Artificial Sequence
  Description of Artificial Sequence: Synthetic oligonucleotide
ucuggagggaggagguacu

SEQ ID NO: 3596 - RNA, 19 nt, Artificial Sequence
  Description of Artificial Sequence: Synthetic oligonucleotide
gucuggagggaggagguac

SEQ ID NO: 3597 - RNA, 19 nt, Artificial Sequence
  Description of Artificial Sequence: Synthetic oligonucleotide
ugucuggagggaggaggua

SEQ ID NO: 3598 - RNA, 19 nt, Artificial Sequence
  Description of Artificial Sequence: Synthetic oligonucleotide
uugucuggagggaggaggu

SEQ ID NO: 3599 - RNA, 19 nt, Artificial Sequence
  Description of Artificial Sequence: Synthetic oligonucleotide
cuugucuggagggaggagg

SEQ ID NO: 3600 - RNA, 19 nt, Artificial Sequence
  Description of Artificial Sequence: Synthetic oligonucleotide
ccuugucuggagggaggag

SEQ ID NO: 3601 - RNA, 19 nt, Artificial Sequence
  Description of Artificial Sequence: Synthetic oligonucleotide
uccuugucuggagggagga

SEQ ID NO: 3602 - RNA, 19 nt, Artificial Sequence
  Description of Artificial Sequence: Synthetic oligonucleotide
uuccuugucuggagggagg

SEQ ID NO: 3603 - RNA, 19 nt, Artificial Sequence
  Description of Artificial Sequence: Synthetic oligonucleotide
cuuccuugucuggagggag

SEQ ID NO: 3604 - RNA, 19 nt, Artificial Sequence
  Description of Artificial Sequence: Synthetic oligonucleotide
ucuuccuugucuggaggga

SEQ ID NO: 3605 - RNA, 19 nt, Artificial Sequence
  Description of Artificial Sequence: Synthetic oligonucleotide
cucuuccuugucuggaggg

SEQ ID NO: 3606 - RNA, 19 nt, Artificial Sequence
  Description of Artificial Sequence: Synthetic oligonucleotide
acucuuccuugucuggagg

SEQ ID NO: 3607 - RNA, 19 nt, Artificial Sequence
  Description of Artificial Sequence: Synthetic oligonucleotide
gacucuuccuugucuggag

SEQ ID NO: 3608 - RNA, 19 nt, Artificial Sequence
  Description of Artificial Sequence: Synthetic oligonucleotide
ugacucuuccuugucugga

SEQ ID NO: 3609 - RNA, 19 nt, Artificial Sequence
  Description of Artificial Sequence: Synthetic oligonucleotide
cugacucuuccuugucugg

SEQ ID NO: 3610 - RNA, 19 nt, Artificial Sequence
  Description of Artificial Sequence: Synthetic oligonucleotide
gcugacucuuccuugucug

SEQ ID NO: 3611 - RNA, 19 nt, Artificial Sequence
  Description of Artificial Sequence: Synthetic oligonucleotide
ggcugacucuuccuugucu

SEQ ID NO: 3612 - RNA, 19 nt, Artificial Sequence
  Description of Artificial Sequence: Synthetic oligonucleotide
gggcugacucuuccuuguc

SEQ ID NO: 3613 - RNA, 19 nt, Artificial Sequence
  Description of Artificial Sequence: Synthetic oligonucleotide
ggggcugacucuuccuugu

SEQ ID NO: 3614 - RNA, 19 nt, Artificial Sequence
  Description of Artificial Sequence: Synthetic oligonucleotide
aggggcugacucuuccuug

SEQ ID NO: 3615 - RNA, 19 nt, Artificial Sequence
  Description of Artificial Sequence: Synthetic oligonucleotide
caggggcugacucuuccuu

SEQ ID NO: 3616 - RNA, 19 nt, Artificial Sequence
  Description of Artificial Sequence: Synthetic oligonucleotide
gcaggggcugacucuuccu

SEQ ID NO: 3617 - RNA, 19 nt, Artificial Sequence
  Description of Artificial Sequence: Synthetic oligonucleotide
agcaggggcugacucuucc

SEQ ID NO: 3618 - RNA, 19 nt, Artificial Sequence
  Description of Artificial Sequence: Synthetic oligonucleotide
gagcaggggcugacucuuc

SEQ ID NO: 3619 - RNA, 19 nt, Artificial Sequence
  Description of Artificial Sequence: Synthetic oligonucleotide
ggagcaggggcugacucuu

SEQ ID NO: 3620 - RNA, 19 nt, Artificial Sequence
  Description of Artificial Sequence: Synthetic oligonucleotide
aggagcaggggcugacucu

SEQ ID NO: 3621 - RNA, 19 nt, Artificial Sequence
  Description of Artificial Sequence: Synthetic oligonucleotide
caggagcaggggcugacuc

SEQ ID NO: 3622 - RNA, 19 nt, Artificial Sequence
  Description of Artificial Sequence: Synthetic oligonucleotide
ccaggagcaggggcugacu

SEQ ID NO: 3623 - RNA, 19 nt, Artificial Sequence
  Description of Artificial Sequence: Synthetic oligonucleotide
uccaggagcaggggcugac

SEQ ID NO: 3624 - RNA, 19 nt, Artificial Sequence
  Description of Artificial Sequence: Synthetic oligonucleotide
guccaggagcaggggcuga

SEQ ID NO: 3625 - RNA, 19 nt, Artificial Sequence
  Description of Artificial Sequence: Synthetic oligonucleotide
uguccaggagcaggggcug

SEQ ID NO: 3626 - RNA, 19 nt, Artificial Sequence
  Description of Artificial Sequence: Synthetic oligonucleotide
guguccaggagcaggggcu

SEQ ID NO: 3627 - RNA, 19 nt, Artificial Sequence
  Description of Artificial Sequence: Synthetic oligonucleotide
gguguccaggagcaggggc

SEQ ID NO: 3628 - RNA, 19 nt, Artificial Sequence
  Description of Artificial Sequence: Synthetic oligonucleotide
ugguguccaggagcagggg

SEQ ID NO: 3629 - RNA, 19 nt, Artificial Sequence
  Description of Artificial Sequence: Synthetic oligonucleotide
cugguguccaggagcaggg

SEQ ID NO: 3630 - RNA, 19 nt, Artificial Sequence
  Description of Artificial Sequence: Synthetic oligonucleotide
gcugguguccaggagcagg

SEQ ID NO: 3631 - RNA, 19 nt, Artificial Sequence
  Description of Artificial Sequence: Synthetic oligonucleotide
ugcugguguccaggagcag

SEQ ID NO: 3632 - RNA, 19 nt, Artificial Sequence
  Description of Artificial Sequence: Synthetic oligonucleotide
uugcugguguccaggagca

SEQ ID NO: 3633 - RNA, 19 nt, Artificial Sequence
  Description of Artificial Sequence: Synthetic oligonucleotide
cuugcugguguccaggagc

SEQ ID NO: 3634 - RNA, 19 nt, Artificial Sequence
  Description of Artificial Sequence: Synthetic oligonucleotide
gcuugcugguguccaggag

SEQ ID NO: 3635 - RNA, 19 nt, Artificial Sequence
  Description of Artificial Sequence: Synthetic oligonucleotide
ggcuugcugguguccagga

SEQ ID NO: 3636 - RNA, 19 nt, Artificial Sequence
  Description of Artificial Sequence: Synthetic oligonucleotide
gggcuugcugguguccagg

SEQ ID NO: 3637 - RNA, 19 nt, Artificial Sequence
  Description of Artificial Sequence: Synthetic oligonucleotide
ugggcuugcugguguccag

SEQ ID NO: 3638 - RNA, 19 nt, Artificial Sequence
  Description of Artificial Sequence: Synthetic oligonucleotide
cugggcuugcuggugucca

SEQ ID NO: 3639 - RNA, 19 nt, Artificial Sequence
  Description of Artificial Sequence: Synthetic oligonucleotide
ucugggcuugcuggugucc

SEQ ID NO: 3640 - RNA, 19 nt, Artificial Sequence
  Description of Artificial Sequence: Synthetic oligonucleotide
uucugggcuugcugguguc

SEQ ID NO: 3641 - RNA, 19 nt, Artificial Sequence
  Description of Artificial Sequence: Synthetic oligonucleotide
cuucugggcuugcuggugu

SEQ ID NO: 3642 - RNA, 19 nt, Artificial Sequence
  Description of Artificial Sequence: Synthetic oligonucleotide
acuucugggcuugcuggug

SEQ ID NO: 3643 - RNA, 19 nt, Artificial Sequence
  Description of Artificial Sequence: Synthetic oligonucleotide
gacuucugggcuugcuggu

SEQ ID NO: 3644 - RNA, 19 nt, Artificial Sequence
  Description of Artificial Sequence: Synthetic oligonucleotide
agacuucugggcuugcugg

SEQ ID NO: 3645 - RNA, 19 nt, Artificial Sequence
  Description of Artificial Sequence: Synthetic oligonucleotide
gagacuucugggcuugcug

SEQ ID NO: 3646 - RNA, 19 nt, Artificial Sequence
  Description of Artificial Sequence: Synthetic oligonucleotide
ggagacuucugggcuugcu

SEQ ID NO: 3647 - RNA, 19 nt, Artificial Sequence
  Description of Artificial Sequence: Synthetic oligonucleotide
gggagacuucugggcuugc

SEQ ID NO: 3648 - RNA, 19 nt, Artificial Sequence
  Description of Artificial Sequence: Synthetic oligonucleotide
ugggagacuucugggcuug

SEQ ID NO: 3649 - RNA, 19 nt, Artificial Sequence
  Description of Artificial Sequence: Synthetic oligonucleotide
uugggagacuucugggcuu

SEQ ID NO: 3650 - RNA, 19 nt, Artificial Sequence
  Description of Artificial Sequence: Synthetic oligonucleotide
cuugggagacuucugggcu

SEQ ID NO: 3651 - RNA, 19 nt, Artificial Sequence
  Description of Artificial Sequence: Synthetic oligonucleotide
ccuugggagacuucugggc

SEQ ID NO: 3652 - RNA, 19 nt, Artificial Sequence
  Description of Artificial Sequence: Synthetic oligonucleotide
gccuugggagacuucuggg

SEQ ID NO: 3653 - RNA, 19 nt, Artificial Sequence
  Description of Artificial Sequence: Synthetic oligonucleotide
ggccuugggagacuucugg

SEQ ID NO: 3654 - RNA, 19 nt, Artificial Sequence
  Description of Artificial Sequence: Synthetic oligonucleotide
uggccuugggagacuucug

SEQ ID NO: 3655 - RNA, 19 nt, Artificial Sequence
  Description of Artificial Sequence: Synthetic oligonucleotide
uuggccuugggagacuucu

SEQ ID NO: 3656 - RNA, 19 nt, Artificial Sequence
  Description of Artificial Sequence: Synthetic oligonucleotide
cuuggccuugggagacuuc

SEQ ID NO: 3657 - RNA, 19 nt, Artificial Sequence
  Description of Artificial Sequence: Synthetic oligonucleotide
gcuuggccuugggagacuu

SEQ ID NO: 3658 - RNA, 19 nt, Artificial Sequence
  Description of Artificial Sequence: Synthetic oligonucleotide
ggcuuggccuugggagacu

SEQ ID NO: 3659 - RNA, 19 nt, Artificial Sequence
  Description of Artificial Sequence: Synthetic oligonucleotide
uggcuuggccuugggagac

SEQ ID NO: 3660 - RNA, 19 nt, Artificial Sequence
  Description of Artificial Sequence: Synthetic oligonucleotide
uuggcuuggccuugggaga

SEQ ID NO: 3661 - RNA, 19 nt, Artificial Sequence
  Description of Artificial Sequence: Synthetic oligonucleotide
cuuggcuuggccuugggag

SEQ ID NO: 3662 - RNA, 19 nt, Artificial Sequence
  Description of Artificial Sequence: Synthetic oligonucleotide
gcuuggcuuggccuuggga

SEQ ID NO: 3663 - RNA, 19 nt, Artificial Sequence
  Description of Artificial Sequence: Synthetic oligonucleotide
ggcuuggcuuggccuuggg

SEQ ID NO: 3664 - RNA, 19 nt, Artificial Sequence
  Description of Artificial Sequence: Synthetic oligonucleotide
aggcuuggcuuggccuugg

SEQ ID NO: 3665 - RNA, 19 nt, Artificial Sequence
  Description of Artificial Sequence: Synthetic oligonucleotide
gaggcuuggcuuggccuug

SEQ ID NO: 3666 - RNA, 19 nt, Artificial Sequence
  Description of Artificial Sequence: Synthetic oligonucleotide
agaggcuuggcuuggccuu

SEQ ID NO: 3667 - RNA, 19 nt, Artificial Sequence
  Description of Artificial Sequence: Synthetic oligonucleotide
aagaggcuuggcuuggccu

SEQ ID NO: 3668 - RNA, 19 nt, Artificial Sequence
  Description of Artificial Sequence: Synthetic oligonucleotide
caagaggcuuggcuuggcc

SEQ ID NO: 3669 - RNA, 19 nt, Artificial Sequence
  Description of Artificial Sequence: Synthetic oligonucleotide
ucaagaggcuuggcuuggc

SEQ ID NO: 3670 - RNA, 19 nt, Artificial Sequence
  Description of Artificial Sequence: Synthetic oligonucleotide
cucaagaggcuuggcuugg

SEQ ID NO: 3671 - RNA, 19 nt, Artificial Sequence
  Description of Artificial Sequence: Synthetic oligonucleotide
gcucaagaggcuuggcuug

SEQ ID NO: 3672 - RNA, 19 nt, Artificial Sequence
  Description of Artificial Sequence: Synthetic oligonucleotide
ugcucaagaggcuuggcuu

SEQ ID NO: 3673 - RNA, 19 nt, Artificial Sequence
  Description of Artificial Sequence: Synthetic oligonucleotide
cugcucaagaggcuuggcu

SEQ ID NO: 3674 - RNA, 19 nt, Artificial Sequence
  Description of Artificial Sequence: Synthetic oligonucleotide
ccugcucaagaggcuuggc

SEQ ID NO: 3675 - RNA, 19 nt, Artificial Sequence
  Description of Artificial Sequence: Synthetic oligonucleotide
cccugcucaagaggcuugg

SEQ ID NO: 3676 - RNA, 19 nt, Artificial Sequence
  Description of Artificial Sequence: Synthetic oligonucleotide
acccugcucaagaggcuug

SEQ ID NO: 3677 - RNA, 19 nt, Artificial Sequence
  Description of Artificial Sequence: Synthetic oligonucleotide
aacccugcucaagaggcuu

SEQ ID NO: 3678 - RNA, 19 nt, Artificial Sequence
  Description of Artificial Sequence: Synthetic oligonucleotide
caacccugcucaagaggcu

SEQ ID NO: 3679 - RNA, 19 nt, Artificial Sequence
  Description of Artificial Sequence: Synthetic oligonucleotide
ccaacccugcucaagaggc

SEQ ID NO: 3680 - RNA, 19 nt, Artificial Sequence
  Description of Artificial Sequence: Synthetic oligonucleotide
cccaacccugcucaagagg

SEQ ID NO: 3681 - RNA, 19 nt, Artificial Sequence
  Description of Artificial Sequence: Synthetic oligonucleotide
ccccaacccugcucaagag

SEQ ID NO: 3682 - RNA, 19 nt, Artificial Sequence
  Description of Artificial Sequence: Synthetic oligonucleotide
gccccaacccugcucaaga

SEQ ID NO: 3683 - RNA, 19 nt, Artificial Sequence
  Description of Artificial Sequence: Synthetic oligonucleotide
agccccaacccugcucaag

SEQ ID NO: 3684 - RNA, 19 nt, Artificial Sequence
  Description of Artificial Sequence: Synthetic oligonucleotide
gagccccaacccugcucaa

SEQ ID NO: 3685 - RNA, 19 nt, Artificial Sequence
  Description of Artificial Sequence: Synthetic oligonucleotide
agagccccaacccugcuca

SEQ ID NO: 3686 - RNA, 19 nt, Artificial Sequence
  Description of Artificial Sequence: Synthetic oligonucleotide
cagagccccaacccugcuc

SEQ ID NO: 3687 - RNA, 19 nt, Artificial Sequence
  Description of Artificial Sequence: Synthetic oligonucleotide
ucagagccccaacccugcu

SEQ ID NO: 3688 - RNA, 19 nt, Artificial Sequence
  Description of Artificial Sequence: Synthetic oligonucleotide
gucagagccccaacccugc

SEQ ID NO: 3689 - RNA, 19 nt, Artificial Sequence
  Description of Artificial Sequence: Synthetic oligonucleotide
ggucagagccccaacccug

SEQ ID NO: 3690 - RNA, 19 nt, Artificial Sequence
  Description of Artificial Sequence: Synthetic oligonucleotide
uggucagagccccaacccu

SEQ ID NO: 3691 - RNA, 19 nt, Artificial Sequence
  Description of Artificial Sequence: Synthetic oligonucleotide
uuggucagagccccaaccc

SEQ ID NO: 3692 - RNA, 19 nt, Artificial Sequence
  Description of Artificial Sequence: Synthetic oligonucleotide
guuggucagagccccaacc

SEQ ID NO: 3693 - RNA, 19 nt, Artificial Sequence
  Description of Artificial Sequence: Synthetic oligonucleotide
uguuggucagagccccaac

SEQ ID NO: 3694 - RNA, 19 nt, Artificial Sequence
  Description of Artificial Sequence: Synthetic oligonucleotide
guguuggucagagccccaa

SEQ ID NO: 3695 - RNA, 19 nt, Artificial Sequence
  Description of Artificial Sequence: Synthetic oligonucleotide
gguguuggucagagcccca

SEQ ID NO: 3696 - RNA, 19 nt, Artificial Sequence
  Description of Artificial Sequence: Synthetic oligonucleotide
ggguguuggucagagcccc

SEQ ID NO: 3697 - RNA, 19 nt, Artificial Sequence
  Description of Artificial Sequence: Synthetic oligonucleotide
aggguguuggucagagccc

SEQ ID NO: 3698 - RNA, 19 nt, Artificial Sequence
  Description of Artificial Sequence: Synthetic oligonucleotide
gaggguguuggucagagcc

SEQ ID NO: 3699 - RNA, 19 nt, Artificial Sequence
  Description of Artificial Sequence: Synthetic oligonucleotide
agaggguguuggucagagc

SEQ ID NO: 3700 - RNA, 19 nt, Artificial Sequence
  Description of Artificial Sequence: Synthetic oligonucleotide
gagaggguguuggucagag

SEQ ID NO: 3701 - RNA, 19 nt, Artificial Sequence
  Description of Artificial Sequence: Synthetic oligonucleotide
agagaggguguuggucaga

SEQ ID NO: 3702 - RNA, 19 nt, Artificial Sequence
  Description of Artificial Sequence: Synthetic oligonucleotide
gagagaggguguuggucag

SEQ ID NO: 3703 - RNA, 19 nt, Artificial Sequence
  Description of Artificial Sequence: Synthetic oligonucleotide
cgagagaggguguugguca

SEQ ID NO: 3704 - RNA, 19 nt, Artificial Sequence
  Description of Artificial Sequence: Synthetic oligonucleotide
ucgagagaggguguugguc

SEQ ID NO: 3705 - RNA, 19 nt, Artificial Sequence
  Description of Artificial Sequence: Synthetic oligonucleotide
aucgagagaggguguuggu

SEQ ID NO: 3706 - RNA, 19 nt, Artificial Sequence
  Description of Artificial Sequence: Synthetic oligonucleotide
uaucgagagaggguguugg

SEQ ID NO: 3707 - RNA, 19 nt, Artificial Sequence
  Description of Artificial Sequence: Synthetic oligonucleotide
guaucgagagaggguguug

SEQ ID NO: 3708 - RNA, 19 nt, Artificial Sequence
  Description of Artificial Sequence: Synthetic oligonucleotide
uguaucgagagaggguguu

SEQ ID NO: 3709 - RNA, 19 nt, Artificial Sequence
  Description of Artificial Sequence: Synthetic oligonucleotide
guguaucgagagagggugu

SEQ ID NO: 3710 - RNA, 19 nt, Artificial Sequence
  Description of Artificial Sequence: Synthetic oligonucleotide
gguguaucgagagagggug

SEQ ID NO: 3711 - RNA, 19 nt, Artificial Sequence
  Description of Artificial Sequence: Synthetic oligonucleotide
cgguguaucgagagagggu

SEQ ID NO: 3712 - RNA, 19 nt, Artificial Sequence
  Description of Artificial Sequence: Synthetic oligonucleotide
acgguguaucgagagaggg

SEQ ID NO: 3713 - RNA, 19 nt, Artificial Sequence
  Description of Artificial Sequence: Synthetic oligonucleotide
cacgguguaucgagagagg

SEQ ID NO: 3714 - RNA, 19 nt, Artificial Sequence
  Description of Artificial Sequence: Synthetic oligonucleotide
gcacgguguaucgagagag

SEQ ID NO: 3715 - RNA, 19 nt, Artificial Sequence
  Description of Artificial Sequence: Synthetic oligonucleotide
ugcacgguguaucgagaga

SEQ ID NO: 3716 - RNA, 19 nt, Artificial Sequence
  Description of Artificial Sequence: Synthetic oligonucleotide
cugcacgguguaucgagag

SEQ ID NO: 3717 - RNA, 19 nt, Artificial Sequence
  Description of Artificial Sequence: Synthetic oligonucleotide
ucugcacgguguaucgaga

SEQ ID NO: 3718 - RNA, 19 nt, Artificial Sequence
  Description of Artificial Sequence: Synthetic oligonucleotide
gucugcacgguguaucgag

SEQ ID NO: 3719 - RNA, 19 nt, Artificial Sequence
  Description of Artificial Sequence: Synthetic oligonucleotide
ggucugcacgguguaucga

SEQ ID NO: 3720 - RNA, 19 nt, Artificial Sequence
  Description of Artificial Sequence: Synthetic oligonucleotide
uggucugcacgguguaucg

SEQ ID NO: 3721 - RNA, 19 nt, Artificial Sequence
  Description of Artificial Sequence: Synthetic oligonucleotide
auggucugcacgguguauc

SEQ ID NO: 3722 - RNA, 19 nt, Artificial Sequence
  Description of Artificial Sequence: Synthetic oligonucleotide
cauggucugcacgguguau

SEQ ID NO: 3723 - RNA, 19 nt, Artificial Sequence
  Description of Artificial Sequence: Synthetic oligonucleotide
ccauggucugcacggugua

SEQ ID NO: 3724 - RNA, 19 nt, Artificial Sequence
  Description of Artificial Sequence: Synthetic oligonucleotide
gccauggucugcacggugu

SEQ ID NO: 3725 - RNA, 19 nt, Artificial Sequence
  Description of Artificial Sequence: Synthetic oligonucleotide
ggccauggucugcacggug

SEQ ID NO: 3726 - RNA, 19 nt, Artificial Sequence
  Description of Artificial Sequence: Synthetic oligonucleotide
gggccauggucugcacggu

SEQ ID NO: 3727 - RNA, 19 nt, Artificial Sequence
  Description of Artificial Sequence: Synthetic oligonucleotide
cgggccauggucugcacgg

SEQ ID NO: 3728 - RNA, 19 nt, Artificial Sequence
  Description of Artificial Sequence: Synthetic oligonucleotide
ccgggccauggucugcacg

SEQ ID NO: 3729 - RNA, 19 nt, Artificial Sequence
  Description of Artificial Sequence: Synthetic oligonucleotide
cccgggccauggucugcac

SEQ ID NO: 3730 - RNA, 19 nt, Artificial Sequence
  Description of Artificial Sequence: Synthetic oligonucleotide
gcccgggccauggucugca

SEQ ID NO: 3731 - RNA, 19 nt, Artificial Sequence
  Description of Artificial Sequence: Synthetic oligonucleotide
ggcccgggccauggucugc

SEQ ID NO: 3732 - RNA, 19 nt, Artificial Sequence
  Description of Artificial Sequence: Synthetic oligonucleotide
gggcccgggccauggucug

SEQ ID NO: 3733 - RNA, 19 nt, Artificial Sequence
  Description of Artificial Sequence: Synthetic oligonucleotide
agggcccgggccauggucu

SEQ ID NO: 3734 - RNA, 19 nt, Artificial Sequence
  Description of Artificial Sequence: Synthetic oligonucleotide
cagggcccgggccaugguc

SEQ ID NO: 3735 - RNA, 19 nt, Artificial Sequence
  Description of Artificial Sequence: Synthetic oligonucleotide
ccagggcccgggccauggu

SEQ ID NO: 3736 - RNA, 19 nt, Artificial Sequence
  Description of Artificial Sequence: Synthetic oligonucleotide
uccagggcccgggccaugg

SEQ ID NO: 3737 - RNA, 19 nt, Artificial Sequence
  Description of Artificial Sequence: Synthetic oligonucleotide
cuccagggcccgggccaug

SEQ ID NO: 3738 - RNA, 19 nt, Artificial Sequence
  Description of Artificial Sequence: Synthetic oligonucleotide
gcuccagggcccgggccau

SEQ ID NO: 3739 - RNA, 19 nt, Artificial Sequence
  Description of Artificial Sequence: Synthetic oligonucleotide
ugcuccagggcccgggcca

SEQ ID NO: 3740 - RNA, 19 nt, Artificial Sequence
  Description of Artificial Sequence: Synthetic oligonucleotide
cugcuccagggcccgggcc

SEQ ID NO: 3741 - RNA, 19 nt, Artificial Sequence
  Description of Artificial Sequence: Synthetic oligonucleotide
ccugcuccagggcccgggc

SEQ ID NO: 3742 - RNA, 19 nt, Artificial Sequence
  Description of Artificial Sequence: Synthetic oligonucleotide
cccugcuccagggcccggg

SEQ ID NO: 3743 - RNA, 19 nt, Artificial Sequence
  Description of Artificial Sequence: Synthetic oligonucleotide
gcccugcuccagggcccgg

SEQ ID NO: 3744 - RNA, 19 nt, Artificial Sequence
  Description of Artificial Sequence: Synthetic oligonucleotide
ggcccugcuccagggcccg

SEQ ID NO: 3745 - RNA, 19 nt, Artificial Sequence
  Description of Artificial Sequence: Synthetic oligonucleotide
uggcccugcuccagggccc

SEQ ID NO: 3746 - RNA, 19 nt, Artificial Sequence
  Description of Artificial Sequence: Synthetic oligonucleotide
guggcccugcuccagggcc

SEQ ID NO: 3747 - RNA, 19 nt, Artificial Sequence
  Description of Artificial Sequence: Synthetic oligonucleotide
uguggcccugcuccagggc

SEQ ID NO: 3748 - RNA, 19 nt, Artificial Sequence
  Description of Artificial Sequence: Synthetic oligonucleotide
guguggcccugcuccaggg

SEQ ID NO: 3749 - RNA, 19 nt, Artificial Sequence
  Description of Artificial Sequence: Synthetic oligonucleotide
gguguggcccugcuccagg

SEQ ID NO: 3750 - RNA, 19 nt, Artificial Sequence
  Description of Artificial Sequence: Synthetic oligonucleotide
cgguguggcccugcuccag

SEQ ID NO: 3751 - RNA, 19 nt, Artificial Sequence
  Description of Artificial Sequence: Synthetic oligonucleotide
acgguguggcccugcucca

SEQ ID NO: 3752 - RNA, 19 nt, Artificial Sequence
  Description of Artificial Sequence: Synthetic oligonucleotide
cacgguguggcccugcucc

SEQ ID NO: 3753 - RNA, 19 nt, Artificial Sequence
  Description of Artificial Sequence: Synthetic oligonucleotide
ccacgguguggcccugcuc

SEQ ID NO: 3754 - RNA, 19 nt, Artificial Sequence
  Description of Artificial Sequence: Synthetic oligonucleotide
gccacgguguggcccugcu

SEQ ID NO: 3755 - RNA, 19 nt, Artificial Sequence
  Description of Artificial Sequence: Synthetic oligonucleotide
ggccacgguguggcccugc

SEQ ID NO: 3756 - RNA, 19 nt, Artificial Sequence
  Description of Artificial Sequence: Synthetic oligonucleotide
uggccacgguguggcccug

SEQ ID NO: 3757 - RNA, 19 nt, Artificial Sequence
  Description of Artificial Sequence: Synthetic oligonucleotide
auggccacgguguggcccu

SEQ ID NO: 3758 - RNA, 19 nt, Artificial Sequence
  Description of Artificial Sequence: Synthetic oligonucleotide
cauggccacgguguggccc

SEQ ID NO: 3759 - RNA, 19 nt, Artificial Sequence
  Description of Artificial Sequence: Synthetic oligonucleotide
acauggccacgguguggcc

SEQ ID NO: 3760 - RNA, 19 nt, Artificial Sequence
  Description of Artificial Sequence: Synthetic oligonucleotide
cacauggccacgguguggc

SEQ ID NO: 3761 - RNA, 19 nt, Artificial Sequence
  Description of Artificial Sequence: Synthetic oligonucleotide
ccacauggccacggugugg

SEQ ID NO: 3762 - RNA, 19 nt, Artificial Sequence
  Description of Artificial Sequence: Synthetic oligonucleotide
uccacauggccacggugug

SEQ ID NO: 3763 - RNA, 19 nt, Artificial Sequence
  Description of Artificial Sequence: Synthetic oligonucleotide
auccacauggccacggugu

SEQ ID NO: 3764 - RNA, 19 nt, Artificial Sequence
  Description of Artificial Sequence: Synthetic oligonucleotide
gauccacauggccacggug

SEQ ID NO: 3765 - RNA, 19 nt, Artificial Sequence
  Description of Artificial Sequence: Synthetic oligonucleotide
ggauccacauggccacggu

SEQ ID NO: 3766 - RNA, 19 nt, Artificial Sequence
  Description of Artificial Sequence: Synthetic oligonucleotide
gggauccacauggccacgg

SEQ ID NO: 3767 - RNA, 19 nt, Artificial Sequence
  Description of Artificial Sequence: Synthetic oligonucleotide
ugggauccacauggccacg

SEQ ID NO: 3768 - RNA, 19 nt, Artificial Sequence
  Description of Artificial Sequence: Synthetic oligonucleotide
cugggauccacauggccac

SEQ ID NO: 3769 - RNA, 19 nt, Artificial Sequence
  Description of Artificial Sequence: Synthetic oligonucleotide
ccugggauccacauggcca

SEQ ID NO: 3770 - RNA, 19 nt, Artificial Sequence
  Description of Artificial Sequence: Synthetic oligonucleotide
gccugggauccacauggcc

SEQ ID NO: 3771 - RNA, 19 nt, Artificial Sequence
  Description of Artificial Sequence: Synthetic oligonucleotide
cgccugggauccacauggc

SEQ ID NO: 3772 - RNA, 19 nt, Artificial Sequence
  Description of Artificial Sequence: Synthetic oligonucleotide
acgccugggauccacaugg

SEQ ID NO: 3773 - RNA, 19 nt, Artificial Sequence
  Description of Artificial Sequence: Synthetic oligonucleotide
cacgccugggauccacaug

SEQ ID NO: 3774 - RNA, 19 nt, Artificial Sequence
  Description of Artificial Sequence: Synthetic oligonucleotide
ccacgccugggauccacau

SEQ ID NO: 3775 - RNA, 19 nt, Artificial Sequence
  Description of Artificial Sequence: Synthetic oligonucleotide
accacgccugggauccaca

SEQ ID NO: 3776 - RNA, 19 nt, Artificial Sequence
  Description of Artificial Sequence: Synthetic oligonucleotide
caccacgccugggauccac

SEQ ID NO: 3777 - RNA, 19 nt, Artificial Sequence
  Description of Artificial Sequence: Synthetic oligonucleotide
gcaccacgccugggaucca

SEQ ID NO: 3778 - RNA, 19 nt, Artificial Sequence
  Description of Artificial Sequence: Synthetic oligonucleotide
ggcaccacgccugggaucc

SEQ ID NO: 3779 - RNA, 19 nt, Artificial Sequence
  Description of Artificial Sequence: Synthetic oligonucleotide
gggcaccacgccugggauc

SEQ ID NO: 3780 - RNA, 19 nt, Artificial Sequence
  Description of Artificial Sequence: Synthetic oligonucleotide
ggggcaccacgccugggau

SEQ ID NO: 3781 - RNA, 19 nt, Artificial Sequence
  Description of Artificial Sequence: Synthetic oligonucleotide
aggggcaccacgccuggga

SEQ ID NO: 3782 - RNA, 19 nt, Artificial Sequence
  Description of Artificial Sequence: Synthetic oligonucleotide
caggggcaccacgccuggg

SEQ ID NO: 3783 - RNA, 19 nt, Artificial Sequence
  Description of Artificial Sequence: Synthetic oligonucleotide
ucaggggcaccacgccugg

SEQ ID NO: 3784 - RNA, 19 nt, Artificial Sequence
  Description of Artificial Sequence: Synthetic oligonucleotide
cucaggggcaccacgccug

SEQ ID NO: 3785 - RNA, 19 nt, Artificial Sequence
  Description of Artificial Sequence: Synthetic oligonucleotide
gcucaggggcaccacgccu

SEQ ID NO: 3786 - RNA, 19 nt, Artificial Sequence
  Description of Artificial Sequence: Synthetic oligonucleotide
ugcucaggggcaccacgcc

SEQ ID NO: 3787 - RNA, 19 nt, Artificial Sequence
  Description of Artificial Sequence: Synthetic oligonucleotide
cugcucaggggcaccacgc

SEQ ID NO: 3788 - RNA, 19 nt, Artificial Sequence
  Description of Artificial Sequence: Synthetic oligonucleotide
gcugcucaggggcaccacg

SEQ ID NO: 3789 - RNA, 19 nt, Artificial Sequence
  Description of Artificial Sequence: Synthetic oligonucleotide
ggcugcucaggggcaccac

SEQ ID NO: 3790 - RNA, 19 nt, Artificial Sequence
  Description of Artificial Sequence: Synthetic oligonucleotide
aggcugcucaggggcacca

SEQ ID NO: 3791 - RNA, 19 nt, Artificial Sequence
  Description of Artificial Sequence: Synthetic oligonucleotide
caggcugcucaggggcacc

SEQ ID NO: 3792 - RNA, 19 nt, Artificial Sequence
  Description of Artificial Sequence: Synthetic oligonucleotide
ccaggcugcucaggggcac

SEQ ID NO: 3793 - RNA, 19 nt, Artificial Sequence
  Description of Artificial Sequence: Synthetic oligonucleotide
gccaggcugcucaggggca

SEQ ID NO: 3794 - RNA, 19 nt, Artificial Sequence
  Description of Artificial Sequence: Synthetic oligonucleotide
ggccaggcugcucaggggc

SEQ ID NO: 3795 - RNA, 19 nt, Artificial Sequence
  Description of Artificial Sequence: Synthetic oligonucleotide
gggccaggcugcucagggg

SEQ ID NO: 3796 - RNA, 19 nt, Artificial Sequence
  Description of Artificial Sequence: Synthetic oligonucleotide
ugggccaggcugcucaggg

SEQ ID NO: 3797 - RNA, 19 nt, Artificial Sequence
  Description of Artificial Sequence: Synthetic oligonucleotide
cugggccaggcugcucagg

SEQ ID NO: 3798 - RNA, 19 nt, Artificial Sequence
  Description of Artificial Sequence: Synthetic oligonucleotide
acugggccaggcugcucag

SEQ ID NO: 3799 - RNA, 19 nt, Artificial Sequence
  Description of Artificial Sequence: Synthetic oligonucleotide
cacugggccaggcugcuca

SEQ ID NO: 3800 - RNA, 19 nt, Artificial Sequence
  Description of Artificial Sequence: Synthetic oligonucleotide
ccacugggccaggcugcuc

SEQ ID NO: 3801 - RNA, 19 nt, Artificial Sequence
  Description of Artificial Sequence: Synthetic oligonucleotide
cccacugggccaggcugcu

SEQ ID NO: 3802 - RNA, 19 nt, Artificial Sequence
  Description of Artificial Sequence: Synthetic oligonucleotide
ccccacugggccaggcugc

SEQ ID NO: 3803 - RNA, 19 nt, Artificial Sequence
  Description of Artificial Sequence: Synthetic oligonucleotide
accccacugggccaggcug

SEQ ID NO: 3804 - RNA, 19 nt, Artificial Sequence
  Description of Artificial Sequence: Synthetic oligonucleotide
caccccacugggccaggcu

SEQ ID NO: 3805 - RNA, 19 nt, Artificial Sequence
  Description of Artificial Sequence: Synthetic oligonucleotide
gcaccccacugggccaggc

SEQ ID NO: 3806 - RNA, 19 nt, Artificial Sequence
  Description of Artificial Sequence: Synthetic oligonucleotide
ggcaccccacugggccagg

SEQ ID NO: 3807 - RNA, 19 nt, Artificial Sequence
  Description of Artificial Sequence: Synthetic oligonucleotide
aggcaccccacugggccag

SEQ ID NO: 3808 - RNA, 19 nt, Artificial Sequence
  Description of Artificial Sequence: Synthetic oligonucleotide
gaggcaccccacugggcca

SEQ ID NO: 3809 - RNA, 19 nt, Artificial Sequence
  Description of Artificial Sequence: Synthetic oligonucleotide
ugaggcaccccacugggcc

SEQ ID NO: 3810 - RNA, 19 nt, Artificial Sequence
  Description of Artificial Sequence: Synthetic oligonucleotide
cugaggcaccccacugggc

SEQ ID NO: 3811 - RNA, 19 nt, Artificial Sequence
  Description of Artificial Sequence: Synthetic oligonucleotide
acugaggcaccccacuggg

SEQ ID NO: 3812 - RNA, 19 nt, Artificial Sequence
  Description of Artificial Sequence: Synthetic oligonucleotide
cacugaggcaccccacugg

SEQ ID NO: 3813 - RNA, 19 nt, Artificial Sequence
  Description of Artificial Sequence: Synthetic oligonucleotide
ccacugaggcaccccacug

SEQ ID NO: 3814 - RNA, 19 nt, Artificial Sequence
  Description of Artificial Sequence: Synthetic oligonucleotide
gccacugaggcaccccacu

SEQ ID NO: 3815 - RNA, 19 nt, Artificial Sequence
  Description of Artificial Sequence: Synthetic oligonucleotide
ggccacugaggcaccccac

SEQ ID NO: 3816 - RNA, 19 nt, Artificial Sequence
  Description of Artificial Sequence: Synthetic oligonucleotide
uggccacugaggcacccca

SEQ ID NO: 3817 - RNA, 19 nt, Artificial Sequence
  Description of Artificial Sequence: Synthetic oligonucleotide
auggccacugaggcacccc

SEQ ID NO: 3818 - RNA, 19 nt, Artificial Sequence
  Description of Artificial Sequence: Synthetic oligonucleotide
cauggccacugaggcaccc

SEQ ID NO: 3819 - RNA, 19 nt, Artificial Sequence
  Description of Artificial Sequence: Synthetic oligonucleotide
gcauggccacugaggcacc

SEQ ID NO: 3820 - RNA, 19 nt, Artificial Sequence
  Description of Artificial Sequence: Synthetic oligonucleotide
ugcauggccacugaggcac

SEQ ID NO: 3821 - RNA, 19 nt, Artificial Sequence
  Description of Artificial Sequence: Synthetic oligonucleotide
cugcauggccacugaggca

SEQ ID NO: 3822 - RNA, 19 nt, Artificial Sequence
  Description of Artificial Sequence: Synthetic oligonucleotide
ccugcauggccacugaggc

SEQ ID NO: 3823 - RNA, 19 nt, Artificial Sequence
  Description of Artificial Sequence: Synthetic oligonucleotide
gccugcauggccacugagg

SEQ ID NO: 3824 - RNA, 19 nt, Artificial Sequence
  Description of Artificial Sequence: Synthetic oligonucleotide
cgccugcauggccacugag

SEQ ID NO: 3825 - RNA, 19 nt, Artificial Sequence
  Description of Artificial Sequence: Synthetic oligonucleotide
ccgccugcauggccacuga

SEQ ID NO: 3826 - RNA, 19 nt, Artificial Sequence
  Description of Artificial Sequence: Synthetic oligonucleotide
accgccugcauggccacug

SEQ ID NO: 3827 - RNA, 19 nt, Artificial Sequence
  Description of Artificial Sequence: Synthetic oligonucleotide
caccgccugcauggccacu

SEQ ID NO: 3828 - RNA, 19 nt, Artificial Sequence
  Description of Artificial Sequence: Synthetic oligonucleotide
acaccgccugcauggccac

SEQ ID NO: 3829 - RNA, 19 nt, Artificial Sequence
  Description of Artificial Sequence: Synthetic oligonucleotide
gacaccgccugcauggcca

SEQ ID NO: 3830 - RNA, 19 nt, Artificial Sequence
  Description of Artificial Sequence: Synthetic oligonucleotide
ggacaccgccugcauggcc

SEQ ID NO: 3831 - RNA, 19 nt, Artificial Sequence
  Description of Artificial Sequence: Synthetic oligonucleotide
gggacaccgccugcauggc

SEQ ID NO: 3832 - RNA, 19 nt, Artificial Sequence
  Description of Artificial Sequence: Synthetic oligonucleotide
cgggacaccgccugcaugg

SEQ ID NO: 3833 - RNA, 19 nt, Artificial Sequence
  Description of Artificial Sequence: Synthetic oligonucleotide
ccgggacaccgccugcaug

SEQ ID NO: 3834 - RNA, 19 nt, Artificial Sequence
  Description of Artificial Sequence: Synthetic oligonucleotide
gccgggacaccgccugcau

SEQ ID NO: 3835 - RNA, 19 nt, Artificial Sequence
  Description of Artificial Sequence: Synthetic oligonucleotide
cgccgggacaccgccugca

SEQ ID NO: 3836 - RNA, 19 nt, Artificial Sequence
  Description of Artificial Sequence: Synthetic oligonucleotide
ccgccgggacaccgccugc

SEQ ID NO: 3837 - RNA, 19 nt, Artificial Sequence
  Description of Artificial Sequence: Synthetic oligonucleotide
uccgccgggacaccgccug

SEQ ID NO: 3838 - RNA, 19 nt, Artificial Sequence
  Description of Artificial Sequence: Synthetic oligonucleotide
cuccgccgggacaccgccu

SEQ ID NO: 3839 - RNA, 19 nt, Artificial Sequence
  Description of Artificial Sequence: Synthetic oligonucleotide
ccuccgccgggacaccgcc

SEQ ID NO: 3840 - RNA, 19 nt, Artificial Sequence
  Description of Artificial Sequence: Synthetic oligonucleotide
uccuccgccgggacaccgc

SEQ ID NO: 3841 - RNA, 19 nt, Artificial Sequence
  Description of Artificial Sequence: Synthetic oligonucleotide
cuccuccgccgggacaccg

SEQ ID NO: 3842 - RNA, 19 nt, Artificial Sequence
  Description of Artificial Sequence: Synthetic oligonucleotide
gcuccuccgccgggacacc

SEQ ID NO: 3843 - RNA, 19 nt, Artificial Sequence
  Description of Artificial Sequence: Synthetic oligonucleotide
cgcuccuccgccgggacac

SEQ ID NO: 3844 - RNA, 19 nt, Artificial Sequence
  Description of Artificial Sequence: Synthetic oligonucleotide
ucgcuccuccgccgggaca

SEQ ID NO: 3845 - RNA, 19 nt, Artificial Sequence
  Description of Artificial Sequence: Synthetic oligonucleotide
uucgcuccuccgccgggac

SEQ ID NO: 3846 - RNA, 19 nt, Artificial Sequence
  Description of Artificial Sequence: Synthetic oligonucleotide
cuucgcuccuccgccggga

SEQ ID NO: 3847 - RNA, 19 nt, Artificial Sequence
  Description of Artificial Sequence: Synthetic oligonucleotide
acuucgcuccuccgccggg

SEQ ID NO: 3848 - RNA, 19 nt, Artificial Sequence
  Description of Artificial Sequence: Synthetic oligonucleotide
cacuucgcuccuccgccgg

SEQ ID NO: 3849 - RNA, 19 nt, Artificial Sequence
  Description of Artificial Sequence: Synthetic oligonucleotide
gcacuucgcuccuccgccg

SEQ ID NO: 3850 - RNA, 19 nt, Artificial Sequence
  Description of Artificial Sequence: Synthetic oligonucleotide
cgcacuucgcuccuccgcc

SEQ ID NO: 3851 - RNA, 19 nt, Artificial Sequence
  Description of Artificial Sequence: Synthetic oligonucleotide
ccgcacuucgcuccuccgc

SEQ ID NO: 3852 - RNA, 19 nt, Artificial Sequence
  Description of Artificial Sequence: Synthetic oligonucleotide
cccgcacuucgcuccuccg

SEQ ID NO: 3853 - RNA, 19 nt, Artificial Sequence
  Description of Artificial Sequence: Synthetic oligonucleotide
acccgcacuucgcuccucc

SEQ ID NO: 3854 - RNA, 19 nt, Artificial Sequence
  Description of Artificial Sequence: Synthetic oligonucleotide
uacccgcacuucgcuccuc

SEQ ID NO: 3855 - RNA, 19 nt, Artificial Sequence
  Description of Artificial Sequence: Synthetic oligonucleotide
guacccgcacuucgcuccu

SEQ ID NO: 3856 - RNA, 19 nt, Artificial Sequence
  Description of Artificial Sequence: Synthetic oligonucleotide
gguacccgcacuucgcucc

SEQ ID NO: 3857 - RNA, 19 nt, Artificial Sequence
  Description of Artificial Sequence: Synthetic oligonucleotide
ggguacccgcacuucgcuc

SEQ ID NO: 3858 - RNA, 19 nt, Artificial Sequence
  Description of Artificial Sequence: Synthetic oligonucleotide
aggguacccgcacuucgcu

SEQ ID NO: 3859 - RNA, 19 nt, Artificial Sequence
  Description of Artificial Sequence: Synthetic oligonucleotide
caggguacccgcacuucgc

SEQ ID NO: 3860 - RNA, 19 nt, Artificial Sequence
  Description of Artificial Sequence: Synthetic oligonucleotide
ccaggguacccgcacuucg

SEQ ID NO: 3861 - RNA, 19 nt, Artificial Sequence
  Description of Artificial Sequence: Synthetic oligonucleotide
gccaggguacccgcacuuc

SEQ ID NO: 3862 - RNA, 19 nt, Artificial Sequence
  Description of Artificial Sequence: Synthetic oligonucleotide
agccaggguacccgcacuu

SEQ ID NO: 3863 - RNA, 19 nt, Artificial Sequence
  Description of Artificial Sequence: Synthetic oligonucleotide
cagccaggguacccgcacu

SEQ ID NO: 3864 - RNA, 19 nt, Artificial Sequence
  Description of Artificial Sequence: Synthetic oligonucleotide
gcagccaggguacccgcac

SEQ ID NO: 3865 - RNA, 19 nt, Artificial Sequence
  Description of Artificial Sequence: Synthetic oligonucleotide
ugcagccaggguacccgca

SEQ ID NO: 3866 - RNA, 19 nt, Artificial Sequence
  Description of Artificial Sequence: Synthetic oligonucleotide
gugcagccaggguacccgc

SEQ ID NO: 3867 - RNA, 19 nt, Artificial Sequence
  Description of Artificial Sequence: Synthetic oligonucleotide
ugugcagccaggguacccg

SEQ ID NO: 3868 - RNA, 19 nt, Artificial Sequence
  Description of Artificial Sequence: Synthetic oligonucleotide
cugugcagccaggguaccc

SEQ ID NO: 3869 - RNA, 19 nt, Artificial Sequence
  Description of Artificial Sequence: Synthetic oligonucleotide
gcugugcagccaggguacc

SEQ ID NO: 3870 - RNA, 19 nt, Artificial Sequence
  Description of Artificial Sequence: Synthetic oligonucleotide
ggcugugcagccaggguac

SEQ ID NO: 3871 - RNA, 19 nt, Artificial Sequence
  Description of Artificial Sequence: Synthetic oligonucleotide
aggcugugcagccagggua

SEQ ID NO: 3872 - RNA, 19 nt, Artificial Sequence
  Description of Artificial Sequence: Synthetic oligonucleotide
gaggcugugcagccagggu

SEQ ID NO: 3873 - RNA, 19 nt, Artificial Sequence
  Description of Artificial Sequence: Synthetic oligonucleotide
cgaggcugugcagccaggg

SEQ ID NO: 3874 - RNA, 19 nt, Artificial Sequence
  Description of Artificial Sequence: Synthetic oligonucleotide
gcgaggcugugcagccagg

SEQ ID NO: 3875 - RNA, 19 nt, Artificial Sequence
  Description of Artificial Sequence: Synthetic oligonucleotide
ugcgaggcugugcagccag

SEQ ID NO: 3876 - RNA, 19 nt, Artificial Sequence
  Description of Artificial Sequence: Synthetic oligonucleotide
cugcgaggcugugcagcca

SEQ ID NO: 3877 - RNA, 19 nt, Artificial Sequence
  Description of Artificial Sequence: Synthetic oligonucleotide
gcugcgaggcugugcagcc

SEQ ID NO: 3878 - RNA, 19 nt, Artificial Sequence
  Description of Artificial Sequence: Synthetic oligonucleotide
ggcugcgaggcugugcagc

SEQ ID NO: 3879 - RNA, 19 nt, Artificial Sequence
  Description of Artificial Sequence: Synthetic oligonucleotide
cggcugcgaggcugugcag

SEQ ID NO: 3880 - RNA, 19 nt, Artificial Sequence
  Description of Artificial Sequence: Synthetic oligonucleotide
gcggcugcgaggcugugca

SEQ ID NO: 3881 - RNA, 19 nt, Artificial Sequence
  Description of Artificial Sequence: Synthetic oligonucleotide
ggcggcugcgaggcugugc

SEQ ID NO: 3882 - RNA, 19 nt, Artificial Sequence
  Description of Artificial Sequence: Synthetic oligonucleotide
gggcggcugcgaggcugug

SEQ ID NO: 3883 - RNA, 19 nt, Artificial Sequence
  Description of Artificial Sequence: Synthetic oligonucleotide
ugggcggcugcgaggcugu

SEQ ID NO: 3884 - RNA, 19 nt, Artificial Sequence
  Description of Artificial Sequence: Synthetic oligonucleotide
cugggcggcugcgaggcug

SEQ ID NO: 3885 - RNA, 19 nt, Artificial Sequence
  Description of Artificial Sequence: Synthetic oligonucleotide
ccugggcggcugcgaggcu

SEQ ID NO: 3886 - RNA, 19 nt, Artificial Sequence
  Description of Artificial Sequence: Synthetic oligonucleotide
uccugggcggcugcgaggc

SEQ ID NO: 3887 - RNA, 19 nt, Artificial Sequence
  Description of Artificial Sequence: Synthetic oligonucleotide
cuccugggcggcugcgagg

SEQ ID NO: 3888 - RNA, 19 nt, Artificial Sequence
  Description of Artificial Sequence: Synthetic oligonucleotide
ccuccugggcggcugcgag

SEQ ID NO: 3889 - RNA, 19 nt, Artificial Sequence
  Description of Artificial Sequence: Synthetic oligonucleotide
uccuccugggcggcugcga

SEQ ID NO: 3890 - RNA, 19 nt, Artificial Sequence
  Description of Artificial Sequence: Synthetic oligonucleotide
cuccuccugggcggcugcg

SEQ ID NO: 3891 - RNA, 19 nt, Artificial Sequence
  Description of Artificial Sequence: Synthetic oligonucleotide
ccuccuccugggcggcugc

SEQ ID NO: 3892 - RNA, 19 nt, Artificial Sequence
  Description of Artificial Sequence: Synthetic oligonucleotide
uccuccuccugggcggcug

SEQ ID NO: 3893 - RNA, 19 nt, Artificial Sequence
  Description of Artificial Sequence: Synthetic oligonucleotide
auccuccuccugggcggcu

SEQ ID NO: 3894 - RNA, 19 nt, Artificial Sequence
  Description of Artificial Sequence: Synthetic oligonucleotide
gauccuccuccugggcggc

SEQ ID NO: 3895 - RNA, 19 nt, Artificial Sequence
  Description of Artificial Sequence: Synthetic oligonucleotide
ugauccuccuccugggcgg

SEQ ID NO: 3896 - RNA, 19 nt, Artificial Sequence
  Description of Artificial Sequence: Synthetic oligonucleotide
augauccuccuccugggcg

SEQ ID NO: 3897 - RNA, 19 nt, Artificial Sequence
  Description of Artificial Sequence: Synthetic oligonucleotide
caugauccuccuccugggc

SEQ ID NO: 3898 - RNA, 19 nt, Artificial Sequence
  Description of Artificial Sequence: Synthetic oligonucleotide
ucaugauccuccuccuggg

SEQ ID NO: 3899 - RNA, 19 nt, Artificial Sequence
  Description of Artificial Sequence: Synthetic oligonucleotide
cucaugauccuccuccugg

SEQ ID NO: 3900 - RNA, 19 nt, Artificial Sequence
  Description of Artificial Sequence: Synthetic oligonucleotide
ccucaugauccuccuccug

SEQ ID NO: 3901 - RNA, 19 nt, Artificial Sequence
  Description of Artificial Sequence: Synthetic oligonucleotide
uccucaugauccuccuccu

SEQ ID NO: 3902 - RNA, 19 nt, Artificial Sequence
  Description of Artificial Sequence: Synthetic oligonucleotide
guccucaugauccuccucc

SEQ ID NO: 3903 - RNA, 19 nt, Artificial Sequence
  Description of Artificial Sequence: Synthetic oligonucleotide
gguccucaugauccuccuc

SEQ ID NO: 3904 - RNA, 19 nt, Artificial Sequence
  Description of Artificial Sequence: Synthetic oligonucleotide
ugguccucaugauccuccu

SEQ ID NO: 3905 - RNA, 19 nt, Artificial Sequence
  Description of Artificial Sequence: Synthetic oligonucleotide
cugguccucaugauccucc

SEQ ID NO: 3906 - RNA, 19 nt, Artificial Sequence
  Description of Artificial Sequence: Synthetic oligonucleotide
ucugguccucaugauccuc

SEQ ID NO: 3907 - RNA, 19 nt, Artificial Sequence
  Description of Artificial Sequence: Synthetic oligonucleotide
gucugguccucaugauccu

SEQ ID NO: 3908 - RNA, 19 nt, Artificial Sequence
  Description of Artificial Sequence: Synthetic oligonucleotide
ugucugguccucaugaucc

SEQ ID NO: 3909 - RNA, 19 nt, Artificial Sequence
  Description of Artificial Sequence: Synthetic oligonucleotide
cugucugguccucaugauc

SEQ ID NO: 3910 - RNA, 19 nt, Artificial Sequence
  Description of Artificial Sequence: Synthetic oligonucleotide
ucugucugguccucaugau

SEQ ID NO: 3911 - RNA, 19 nt, Artificial Sequence
  Description of Artificial Sequence: Synthetic oligonucleotide
gucugucugguccucauga

SEQ ID NO: 3912 - RNA, 19 nt, Artificial Sequence
  Description of Artificial Sequence: Synthetic oligonucleotide
ugucugucugguccucaug

SEQ ID NO: 3913 - RNA, 19 nt, Artificial Sequence
  Description of Artificial Sequence: Synthetic oligonucleotide
gugucugucugguccucau

SEQ ID NO: 3914 - RNA, 19 nt, Artificial Sequence
  Description of Artificial Sequence: Synthetic oligonucleotide
cgugucugucugguccuca

SEQ ID NO: 3915 - RNA, 19 nt, Artificial Sequence
  Description of Artificial Sequence: Synthetic oligonucleotide
ccgugucugucugguccuc

SEQ ID NO: 3916 - RNA, 19 nt, Artificial Sequence
  Description of Artificial Sequence: Synthetic oligonucleotide
uccgugucugucugguccu

SEQ ID NO: 3917 - RNA, 19 nt, Artificial Sequence
  Description of Artificial Sequence: Synthetic oligonucleotide
cuccgugucugucuggucc

SEQ ID NO: 3918 - RNA, 19 nt, Artificial Sequence
  Description of Artificial Sequence: Synthetic oligonucleotide
ccuccgugucugucugguc

SEQ ID NO: 3919 - RNA, 19 nt, Artificial Sequence
  Description of Artificial Sequence: Synthetic oligonucleotide
cccuccgugucugucuggu

SEQ ID NO: 3920 - RNA, 19 nt, Artificial Sequence
  Description of Artificial Sequence: Synthetic oligonucleotide
ucccuccgugucugucugg

SEQ ID NO: 3921 - RNA, 19 nt, Artificial Sequence
  Description of Artificial Sequence: Synthetic oligonucleotide
cucccuccgugucugucug

SEQ ID NO: 3922 - RNA, 19 nt, Artificial Sequence
  Description of Artificial Sequence: Synthetic oligonucleotide
ucucccuccgugucugucu

SEQ ID NO: 3923 - RNA, 19 nt, Artificial Sequence
  Description of Artificial Sequence: Synthetic oligonucleotide
cucucccuccgugucuguc

SEQ ID NO: 3924 - RNA, 19 nt, Artificial Sequence
  Description of Artificial Sequence: Synthetic oligonucleotide
ccucucccuccgugucugu

SEQ ID NO: 3925 - RNA, 19 nt, Artificial Sequence
  Description of Artificial Sequence: Synthetic oligonucleotide
uccucucccuccgugucug

SEQ ID NO: 3926 - RNA, 19 nt, Artificial Sequence
  Description of Artificial Sequence: Synthetic oligonucleotide
guccucucccuccgugucu

SEQ ID NO: 3927 - RNA, 19 nt, Artificial Sequence
  Description of Artificial Sequence: Synthetic oligonucleotide
uguccucucccuccguguc

SEQ ID NO: 3928 - RNA, 19 nt, Artificial Sequence
  Description of Artificial Sequence: Synthetic oligonucleotide
guguccucucccuccgugu

SEQ ID NO: 3929 - RNA, 19 nt, Artificial Sequence
  Description of Artificial Sequence: Synthetic oligonucleotide
cguguccucucccuccgug

SEQ ID NO: 3930 - RNA, 19 nt, Artificial Sequence
  Description of Artificial Sequence: Synthetic oligonucleotide
ccguguccucucccuccgu

SEQ ID NO: 3931 - RNA, 19 nt, Artificial Sequence
  Description of Artificial Sequence: Synthetic oligonucleotide
uccguguccucucccuccg

SEQ ID NO: 3932 - RNA, 19 nt, Artificial Sequence
  Description of Artificial Sequence: Synthetic oligonucleotide
cuccguguccucucccucc

SEQ ID NO: 3933 - RNA, 19 nt, Artificial Sequence
  Description of Artificial Sequence: Synthetic oligonucleotide
ccuccguguccucucccuc

SEQ ID NO: 3934 - RNA, 19 nt, Artificial Sequence
  Description of Artificial Sequence: Synthetic oligonucleotide
uccuccguguccucucccu

SEQ ID NO: 3935 - RNA, 19 nt, Artificial Sequence
  Description of Artificial Sequence: Synthetic oligonucleotide
cuccuccguguccucuccc

SEQ ID NO: 3936 - RNA, 19 nt, Artificial Sequence
  Description of Artificial Sequence: Synthetic oligonucleotide
ccuccuccguguccucucc

SEQ ID NO: 3937 - RNA, 19 nt, Artificial Sequence
  Description of Artificial Sequence: Synthetic oligonucleotide
uccuccuccguguccucuc

SEQ ID NO: 3938 - RNA, 19 nt, Artificial Sequence
  Description of Artificial Sequence: Synthetic oligonucleotide
cuccuccuccguguccucu

SEQ ID NO: 3939 - RNA, 19 nt, Artificial Sequence
  Description of Artificial Sequence: Synthetic oligonucleotide
ccuccuccuccguguccuc

SEQ ID NO: 3940 - RNA, 19 nt, Artificial Sequence
  Description of Artificial Sequence: Synthetic oligonucleotide
uccuccuccuccguguccu

SEQ ID NO: 3941 - RNA, 19 nt, Artificial Sequence
  Description of Artificial Sequence: Synthetic oligonucleotide
uuccuccuccuccgugucc

SEQ ID NO: 3942 - RNA, 19 nt, Artificial Sequence
  Description of Artificial Sequence: Synthetic oligonucleotide
cuuccuccuccuccguguc

SEQ ID NO: 3943 - RNA, 19 nt, Artificial Sequence
  Description of Artificial Sequence: Synthetic oligonucleotide
ucuuccuccuccuccgugu

SEQ ID NO: 3944 - RNA, 19 nt, Artificial Sequence
  Description of Artificial Sequence: Synthetic oligonucleotide
uucuuccuccuccuccgug

SEQ ID NO: 3945 - RNA, 19 nt, Artificial Sequence
  Description of Artificial Sequence: Synthetic oligonucleotide
auucuuccuccuccuccgu

SEQ ID NO: 3946 - RNA, 19 nt, Artificial Sequence
  Description of Artificial Sequence: Synthetic oligonucleotide
aauucuuccuccuccuccg

SEQ ID NO: 3947 - RNA, 19 nt, Artificial Sequence
  Description of Artificial Sequence: Synthetic oligonucleotide
caauucuuccuccuccucc

SEQ ID NO: 3948 - RNA, 19 nt, Artificial Sequence
  Description of Artificial Sequence: Synthetic oligonucleotide
ccaauucuuccuccuccuc

SEQ ID NO: 3949 - RNA, 19 nt, Artificial Sequence
  Description of Artificial Sequence: Synthetic oligonucleotide
uccaauucuuccuccuccu

SEQ ID NO: 3950 - RNA, 19 nt, Artificial Sequence
  Description of Artificial Sequence: Synthetic oligonucleotide
cuccaauucuuccuccucc

SEQ ID NO: 3951 - RNA, 19 nt, Artificial Sequence
  Description of Artificial Sequence: Synthetic oligonucleotide
ucuccaauucuuccuccuc

SEQ ID NO: 3952 - RNA, 19 nt, Artificial Sequence
  Description of Artificial Sequence: Synthetic oligonucleotide
gucuccaauucuuccuccu

SEQ ID NO: 3953 - RNA, 19 nt, Artificial Sequence
  Description of Artificial Sequence: Synthetic oligonucleotide
agucuccaauucuuccucc

SEQ ID NO: 3954 - RNA, 19 nt, Artificial Sequence
  Description of Artificial Sequence: Synthetic oligonucleotide
cagucuccaauucuuccuc

SEQ ID NO: 3955 - RNA, 19 nt, Artificial Sequence
  Description of Artificial Sequence: Synthetic oligonucleotide
ucagucuccaauucuuccu

SEQ ID NO: 3956 - RNA, 19 nt, Artificial Sequence
  Description of Artificial Sequence: Synthetic oligonucleotide
cucagucuccaauucuucc

SEQ ID NO: 3957 - RNA, 19 nt, Artificial Sequence
  Description of Artificial Sequence: Synthetic oligonucleotide
ccucagucuccaauucuuc

SEQ ID NO: 3958 - RNA, 19 nt, Artificial Sequence
  Description of Artificial Sequence: Synthetic oligonucleotide
uccucagucuccaauucuu

SEQ ID NO: 3959 - RNA, 19 nt, Artificial Sequence
  Description of Artificial Sequence: Synthetic oligonucleotide
cuccucagucuccaauucu

SEQ ID NO: 3960 - RNA, 19 nt, Artificial Sequence
  Description of Artificial Sequence: Synthetic oligonucleotide
ucuccucagucuccaauuc

SEQ ID NO: 3961 - RNA, 19 nt, Artificial Sequence
  Description of Artificial Sequence: Synthetic oligonucleotide
uucuccucagucuccaauu

SEQ ID NO: 3962 - RNA, 19 nt, Artificial Sequence
  Description of Artificial Sequence: Synthetic oligonucleotide
guucuccucagucuccaau

SEQ ID NO: 3963 - RNA, 19 nt, Artificial Sequence
  Description of Artificial Sequence: Synthetic oligonucleotide
uguucuccucagucuccaa

SEQ ID NO: 3964 - RNA, 19 nt, Artificial Sequence
  Description of Artificial Sequence: Synthetic oligonucleotide
uuguucuccucagucucca

SEQ ID NO: 3965 - RNA, 19 nt, Artificial Sequence
  Description of Artificial Sequence: Synthetic oligonucleotide
cuuguucuccucagucucc

SEQ ID NO: 3966 - RNA, 19 nt, Artificial Sequence
  Description of Artificial Sequence: Synthetic oligonucleotide
acuuguucuccucagucuc

SEQ ID NO: 3967 - RNA, 19 nt, Artificial Sequence
  Description of Artificial Sequence: Synthetic oligonucleotide
aacuuguucuccucagucu

SEQ ID NO: 3968 - RNA, 19 nt, Artificial Sequence
  Description of Artificial Sequence: Synthetic oligonucleotide
gaacuuguucuccucaguc

SEQ ID NO: 3969 - RNA, 19 nt, Artificial Sequence
  Description of Artificial Sequence: Synthetic oligonucleotide
ugaacuuguucuccucagu

SEQ ID NO: 3970 - RNA, 19 nt, Artificial Sequence
  Description of Artificial Sequence: Synthetic oligonucleotide
cugaacuuguucuccucag

SEQ ID NO: 3971 - RNA, 19 nt, Artificial Sequence
  Description of Artificial Sequence: Synthetic oligonucleotide
acugaacuuguucuccuca

SEQ ID NO: 3972 - RNA, 19 nt, Artificial Sequence
  Description of Artificial Sequence: Synthetic oligonucleotide
cacugaacuuguucuccuc

SEQ ID NO: 3973 - RNA, 19 nt, Artificial Sequence
  Description of Artificial Sequence: Synthetic oligonucleotide
ucacugaacuuguucuccu

SEQ ID NO: 3974 - RNA, 19 nt, Artificial Sequence
  Description of Artificial Sequence: Synthetic oligonucleotide
cucacugaacuuguucucc

SEQ ID NO: 3975 - RNA, 19 nt, Artificial Sequence
  Description of Artificial Sequence: Synthetic oligonucleotide
ccucacugaacuuguucuc

SEQ ID NO: 3976 - RNA, 19 nt, Artificial Sequence
  Description of Artificial Sequence: Synthetic oligonucleotide
accucacugaacuuguucu

SEQ ID NO: 3977 - RNA, 19 nt, Artificial Sequence
  Description of Artificial Sequence: Synthetic oligonucleotide
uaccucacugaacuuguuc

SEQ ID NO: 3978 - RNA, 19 nt, Artificial Sequence
  Description of Artificial Sequence: Synthetic oligonucleotide
cuaccucacugaacuuguu

SEQ ID NO: 3979 - RNA, 19 nt, Artificial Sequence
  Description of Artificial Sequence: Synthetic oligonucleotide
gcuaccucacugaacuugu

SEQ ID NO: 3980 - RNA, 19 nt, Artificial Sequence
  Description of Artificial Sequence: Synthetic oligonucleotide
ugcuaccucacugaacuug

SEQ ID NO: 3981 - RNA, 19 nt, Artificial Sequence
  Description of Artificial Sequence: Synthetic oligonucleotide
cugcuaccucacugaacuu

SEQ ID NO: 3982 - RNA, 19 nt, Artificial Sequence
  Description of Artificial Sequence: Synthetic oligonucleotide
gcugcuaccucacugaacu

SEQ ID NO: 3983 - RNA, 19 nt, Artificial Sequence
  Description of Artificial Sequence: Synthetic oligonucleotide
ggcugcuaccucacugaac

SEQ ID NO: 3984 - RNA, 19 nt, Artificial Sequence
  Description of Artificial Sequence: Synthetic oligonucleotide
gggcugcuaccucacugaa

SEQ ID NO: 3985 - RNA, 19 nt, Artificial Sequence
  Description of Artificial Sequence: Synthetic oligonucleotide
agggcugcuaccucacuga

SEQ ID NO: 3986 - RNA, 19 nt, Artificial Sequence
  Description of Artificial Sequence: Synthetic oligonucleotide
cagggcugcuaccucacug

SEQ ID NO: 3987 - RNA, 19 nt, Artificial Sequence
  Description of Artificial Sequence: Synthetic oligonucleotide
gcagggcugcuaccucacu

SEQ ID NO: 3988 - RNA, 19 nt, Artificial Sequence
  Description of Artificial Sequence: Synthetic oligonucleotide
ggcagggcugcuaccucac

SEQ ID NO: 3989 - RNA, 19 nt, Artificial Sequence
  Description of Artificial Sequence: Synthetic oligonucleotide
uggcagggcugcuaccuca

SEQ ID NO: 3990 - RNA, 19 nt, Artificial Sequence
  Description of Artificial Sequence: Synthetic oligonucleotide
cuggcagggcugcuaccuc

SEQ ID NO: 3991 - RNA, 19 nt, Artificial Sequence
  Description of Artificial Sequence: Synthetic oligonucleotide
ccuggcagggcugcuaccu

SEQ ID NO: 3992 - RNA, 19 nt, Artificial Sequence
  Description of Artificial Sequence: Synthetic oligonucleotide
gccuggcagggcugcuacc

SEQ ID NO: 3993 - RNA, 19 nt, Artificial Sequence
  Description of Artificial Sequence: Synthetic oligonucleotide
ggccuggcagggcugcuac

SEQ ID NO: 3994 - RNA, 19 nt, Artificial Sequence
  Description of Artificial Sequence: Synthetic oligonucleotide
gggccuggcagggcugcua

SEQ ID NO: 3995 - RNA, 19 nt, Artificial Sequence
  Description of Artificial Sequence: Synthetic oligonucleotide
agggccuggcagggcugcu

SEQ ID NO: 3996 - RNA, 19 nt, Artificial Sequence
  Description of Artificial Sequence: Synthetic oligonucleotide
gagggccuggcagggcugc

SEQ ID NO: 3997 - RNA, 19 nt, Artificial Sequence
  Description of Artificial Sequence: Synthetic oligonucleotide
cgagggccuggcagggcug

SEQ ID NO: 3998 - RNA, 19 nt, Artificial Sequence
  Description of Artificial Sequence: Synthetic oligonucleotide
ucgagggccuggcagggcu

SEQ ID NO: 3999 - RNA, 19 nt, Artificial Sequence
  Description of Artificial Sequence: Synthetic oligonucleotide
cucgagggccuggcagggc

SEQ ID NO: 4000 - RNA, 19 nt, Artificial Sequence
  Description of Artificial Sequence: Synthetic oligonucleotide
ccucgagggccuggcaggg

SEQ ID NO: 4001 - RNA, 19 nt, Artificial Sequence
  Description of Artificial Sequence: Synthetic oligonucleotide
gccucgagggccuggcagg

SEQ ID NO: 4002 - RNA, 19 nt, Artificial Sequence
  Description of Artificial Sequence: Synthetic oligonucleotide
ggccucgagggccuggcag

SEQ ID NO: 4003 - RNA, 19 nt, Artificial Sequence
  Description of Artificial Sequence: Synthetic oligonucleotide
aggccucgagggccuggca

SEQ ID NO: 4004 - RNA, 19 nt, Artificial Sequence
  Description of Artificial Sequence: Synthetic oligonucleotide
gaggccucgagggccuggc

SEQ ID NO: 4005 - RNA, 19 nt, Artificial Sequence
  Description of Artificial Sequence: Synthetic oligonucleotide
ggaggccucgagggccugg

SEQ ID NO: 4006 - RNA, 19 nt, Artificial Sequence
  Description of Artificial Sequence: Synthetic oligonucleotide
aggaggccucgagggccug

SEQ ID NO: 4007 - RNA, 19 nt, Artificial Sequence
  Description of Artificial Sequence: Synthetic oligonucleotide
caggaggccucgagggccu

SEQ ID NO: 4008 - RNA, 19 nt, Artificial Sequence
  Description of Artificial Sequence: Synthetic oligonucleotide
ccaggaggccucgagggcc

SEQ ID NO: 4009 - RNA, 19 nt, Artificial Sequence
  Description of Artificial Sequence: Synthetic oligonucleotide
cccaggaggccucgagggc

SEQ ID NO: 4010 - RNA, 19 nt, Artificial Sequence
  Description of Artificial Sequence: Synthetic oligonucleotide
acccaggaggccucgaggg

SEQ ID NO: 4011 - RNA, 19 nt, Artificial Sequence
  Description of Artificial Sequence: Synthetic oligonucleotide
cacccaggaggccucgagg

SEQ ID NO: 4012 - RNA, 19 nt, Artificial Sequence
  Description of Artificial Sequence: Synthetic oligonucleotide
ccacccaggaggccucgag

SEQ ID NO: 4013 - RNA, 19 nt, Artificial Sequence
  Description of Artificial Sequence: Synthetic oligonucleotide
accacccaggaggccucga

SEQ ID NO: 4014 - RNA, 19 nt, Artificial Sequence
  Description of Artificial Sequence: Synthetic oligonucleotide
caccacccaggaggccucg

SEQ ID NO: 4015 - RNA, 19 nt, Artificial Sequence
  Description of Artificial Sequence: Synthetic oligonucleotide
acaccacccaggaggccuc

SEQ ID NO: 4016 - RNA, 19 nt, Artificial Sequence
  Description of Artificial Sequence: Synthetic oligonucleotide
cacaccacccaggaggccu

SEQ ID NO: 4017 - RNA, 19 nt, Artificial Sequence
  Description of Artificial Sequence: Synthetic oligonucleotide
ccacaccacccaggaggcc

SEQ ID NO: 4018 - RNA, 19 nt, Artificial Sequence
  Description of Artificial Sequence: Synthetic oligonucleotide
gccacaccacccaggaggc

SEQ ID NO: 4019 - RNA, 19 nt, Artificial Sequence
  Description of Artificial Sequence: Synthetic oligonucleotide
ugccacaccacccaggagg

SEQ ID NO: 4020 - RNA, 19 nt, Artificial Sequence
  Description of Artificial Sequence: Synthetic oligonucleotide
gugccacaccacccaggag

SEQ ID NO: 4021 - RNA, 19 nt, Artificial Sequence
  Description of Artificial Sequence: Synthetic oligonucleotide
ugugccacaccacccagga

SEQ ID NO: 4022 - RNA, 19 nt, Artificial Sequence
  Description of Artificial Sequence: Synthetic oligonucleotide
augugccacaccacccagg

SEQ ID NO: 4023 - RNA, 19 nt, Artificial Sequence
  Description of Artificial Sequence: Synthetic oligonucleotide
uaugugccacaccacccag

SEQ ID NO: 4024 - RNA, 19 nt, Artificial Sequence
  Description of Artificial Sequence: Synthetic oligonucleotide
guaugugccacaccaccca

SEQ ID NO: 4025 - RNA, 19 nt, Artificial Sequence
  Description of Artificial Sequence: Synthetic oligonucleotide
gguaugugccacaccaccc

SEQ ID NO: 4026 - RNA, 19 nt, Artificial Sequence
  Description of Artificial Sequence: Synthetic oligonucleotide
ggguaugugccacaccacc

SEQ ID NO: 4027 - RNA, 19 nt, Artificial Sequence
  Description of Artificial Sequence: Synthetic oligonucleotide
aggguaugugccacaccac

SEQ ID NO: 4028 - RNA, 19 nt, Artificial Sequence
  Description of Artificial Sequence: Synthetic oligonucleotide
caggguaugugccacacca

SEQ ID NO: 4029 - RNA, 19 nt, Artificial Sequence
  Description of Artificial Sequence: Synthetic oligonucleotide
gcaggguaugugccacacc

SEQ ID NO: 4030 - RNA, 19 nt, Artificial Sequence
  Description of Artificial Sequence: Synthetic oligonucleotide
ugcaggguaugugccacac

SEQ ID NO: 4031 - RNA, 19 nt, Artificial Sequence
  Description of Artificial Sequence: Synthetic oligonucleotide
cugcaggguaugugccaca

SEQ ID NO: 4032 - RNA, 19 nt, Artificial Sequence
  Description of Artificial Sequence: Synthetic oligonucleotide
ucugcaggguaugugccac

SEQ ID NO: 4033 - RNA, 19 nt, Artificial Sequence
  Description of Artificial Sequence: Synthetic oligonucleotide
uucugcaggguaugugcca

SEQ ID NO: 4034 - RNA, 19 nt, Artificial Sequence
  Description of Artificial Sequence: Synthetic oligonucleotide
cuucugcaggguaugugcc

SEQ ID NO: 4035 - RNA, 19 nt, Artificial Sequence
  Description of Artificial Sequence: Synthetic oligonucleotide
ucuucugcaggguaugugc

SEQ ID NO: 4036 - RNA, 19 nt, Artificial Sequence
  Description of Artificial Sequence: Synthetic oligonucleotide
gucuucugcaggguaugug

SEQ ID NO: 4037 - RNA, 19 nt, Artificial Sequence
  Description of Artificial Sequence: Synthetic oligonucleotide
ggucuucugcaggguaugu

SEQ ID NO: 4038 - RNA, 19 nt, Artificial Sequence
  Description of Artificial Sequence: Synthetic oligonucleotide
gggucuucugcaggguaug

SEQ ID NO: 4039 - RNA, 19 nt, Artificial Sequence
  Description of Artificial Sequence: Synthetic oligonucleotide
agggucuucugcaggguau

SEQ ID NO: 4040 - RNA, 19 nt, Artificial Sequence
  Description of Artificial Sequence: Synthetic oligonucleotide
gagggucuucugcagggua

SEQ ID NO: 4041 - RNA, 19 nt, Artificial Sequence
  Description of Artificial Sequence: Synthetic oligonucleotide
ggagggucuucugcagggu

SEQ ID NO: 4042 - RNA, 19 nt, Artificial Sequence
  Description of Artificial Sequence: Synthetic oligonucleotide
uggagggucuucugcaggg

SEQ ID NO: 4043 - RNA, 19 nt, Artificial Sequence
  Description of Artificial Sequence: Synthetic oligonucleotide
cuggagggucuucugcagg

SEQ ID NO: 4044 - RNA, 19 nt, Artificial Sequence
  Description of Artificial Sequence: Synthetic oligonucleotide
ucuggagggucuucugcag

SEQ ID NO: 4045 - RNA, 19 nt, Artificial Sequence
  Description of Artificial Sequence: Synthetic oligonucleotide
gucuggagggucuucugca

SEQ ID NO: 4046 - RNA, 19 nt, Artificial Sequence
  Description of Artificial Sequence: Synthetic oligonucleotide
ggucuggagggucuucugc

SEQ ID NO: 4047 - RNA, 19 nt, Artificial Sequence
  Description of Artificial Sequence: Synthetic oligonucleotide
uggucuggagggucuucug

SEQ ID NO: 4048 - RNA, 19 nt, Artificial Sequence
  Description of Artificial Sequence: Synthetic oligonucleotide
guggucuggagggucuucu

SEQ ID NO: 4049 - RNA, 19 nt, Artificial Sequence
  Description of Artificial Sequence: Synthetic oligonucleotide
gguggucuggagggucuuc

SEQ ID NO: 4050 - RNA, 19 nt, Artificial Sequence
  Description of Artificial Sequence: Synthetic oligonucleotide
ugguggucuggagggucuu

SEQ ID NO: 4051 - RNA, 19 nt, Artificial Sequence
  Description of Artificial Sequence: Synthetic oligonucleotide
augguggucuggagggucu

SEQ ID NO: 4052 - RNA, 19 nt, Artificial Sequence
  Description of Artificial Sequence: Synthetic oligonucleotide
gaugguggucuggaggguc

SEQ ID NO: 4053 - RNA, 19 nt, Artificial Sequence
  Description of Artificial Sequence: Synthetic oligonucleotide
agaugguggucuggagggu

SEQ ID NO: 4054 - RNA, 19 nt, Artificial Sequence
  Description of Artificial Sequence: Synthetic oligonucleotide
gagaugguggucuggaggg

SEQ ID NO: 4055 - RNA, 19 nt, Artificial Sequence
  Description of Artificial Sequence: Synthetic oligonucleotide
cgagaugguggucuggagg

SEQ ID NO: 4056 - RNA, 19 nt, Artificial Sequence
  Description of Artificial Sequence: Synthetic oligonucleotide
ccgagaugguggucuggag

SEQ ID NO: 4057 - RNA, 19 nt, Artificial Sequence
  Description of Artificial Sequence: Synthetic oligonucleotide
gccgagaugguggucugga

SEQ ID NO: 4058 - RNA, 19 nt, Artificial Sequence
  Description of Artificial Sequence: Synthetic oligonucleotide
agccgagaugguggucugg

SEQ ID NO: 4059 - RNA, 19 nt, Artificial Sequence
  Description of Artificial Sequence: Synthetic oligonucleotide
cagccgagaugguggucug

SEQ ID NO: 4060 - RNA, 19 nt, Artificial Sequence
  Description of Artificial Sequence: Synthetic oligonucleotide
acagccgagaugguggucu

SEQ ID NO: 4061 - RNA, 19 nt, Artificial Sequence
  Description of Artificial Sequence: Synthetic oligonucleotide
cacagccgagauggugguc

SEQ ID NO: 4062 - RNA, 19 nt, Artificial Sequence
  Description of Artificial Sequence: Synthetic oligonucleotide
ucacagccgagaugguggu

SEQ ID NO: 4063 - RNA, 19 nt, Artificial Sequence
  Description of Artificial Sequence: Synthetic oligonucleotide
gucacagccgagauggugg

SEQ ID NO: 4064 - RNA, 19 nt, Artificial Sequence
  Description of Artificial Sequence: Synthetic oligonucleotide
ugucacagccgagauggug

SEQ ID NO: 4065 - RNA, 19 nt, Artificial Sequence
  Description of Artificial Sequence: Synthetic oligonucleotide
augucacagccgagauggu

SEQ ID NO: 4066 - RNA, 19 nt, Artificial Sequence
  Description of Artificial Sequence: Synthetic oligonucleotide
caugucacagccgagaugg

SEQ ID NO: 4067 - RNA, 19 nt, Artificial Sequence
  Description of Artificial Sequence: Synthetic oligonucleotide
ccaugucacagccgagaug

SEQ ID NO: 4068 - RNA, 19 nt, Artificial Sequence
  Description of Artificial Sequence: Synthetic oligonucleotide
cccaugucacagccgagau

SEQ ID NO: 4069 - RNA, 19 nt, Artificial Sequence
  Description of Artificial Sequence: Synthetic oligonucleotide
gcccaugucacagccgaga

SEQ ID NO: 4070 - RNA, 19 nt, Artificial Sequence
  Description of Artificial Sequence: Synthetic oligonucleotide
ugcccaugucacagccgag

SEQ ID NO: 4071 - RNA, 19 nt, Artificial Sequence
  Description of Artificial Sequence: Synthetic oligonucleotide
gugcccaugucacagccga

SEQ ID NO: 4072 - RNA, 19 nt, Artificial Sequence
  Description of Artificial Sequence: Synthetic oligonucleotide
ggugcccaugucacagccg

SEQ ID NO: 4073 - RNA, 19 nt, Artificial Sequence
  Description of Artificial Sequence: Synthetic oligonucleotide
aggugcccaugucacagcc

SEQ ID NO: 4074 - RNA, 19 nt, Artificial Sequence
  Description of Artificial Sequence: Synthetic oligonucleotide
caggugcccaugucacagc

SEQ ID NO: 4075 - RNA, 19 nt, Artificial Sequence
  Description of Artificial Sequence: Synthetic oligonucleotide
gcaggugcccaugucacag

SEQ ID NO: 4076 - RNA, 19 nt, Artificial Sequence
  Description of Artificial Sequence: Synthetic oligonucleotide
ugcaggugcccaugucaca

SEQ ID NO: 4077 - RNA, 19 nt, Artificial Sequence
  Description of Artificial Sequence: Synthetic oligonucleotide
cugcaggugcccaugucac

SEQ ID NO: 4078 - RNA, 19 nt, Artificial Sequence
  Description of Artificial Sequence: Synthetic oligonucleotide
gcugcaggugcccauguca

SEQ ID NO: 4079 - RNA, 19 nt, Artificial Sequence
  Description of Artificial Sequence: Synthetic oligonucleotide
agcugcaggugcccauguc

SEQ ID NO: 4080 - RNA, 19 nt, Artificial Sequence
  Description of Artificial Sequence: Synthetic oligonucleotide
cagcugcaggugcccaugu

SEQ ID NO: 4081 - RNA, 19 nt, Artificial Sequence
  Description of Artificial Sequence: Synthetic oligonucleotide
acagcugcaggugcccaug

SEQ ID NO: 4082 - RNA, 19 nt, Artificial Sequence
  Description of Artificial Sequence: Synthetic oligonucleotide
cacagcugcaggugcccau

SEQ ID NO: 4083 - RNA, 19 nt, Artificial Sequence
  Description of Artificial Sequence: Synthetic oligonucleotide
gcacagcugcaggugccca

SEQ ID NO: 4084 - RNA, 19 nt, Artificial Sequence
  Description of Artificial Sequence: Synthetic oligonucleotide
agcacagcugcaggugccc

SEQ ID NO: 4085 - RNA, 19 nt, Artificial Sequence
  Description of Artificial Sequence: Synthetic oligonucleotide
cagcacagcugcaggugcc

SEQ ID NO: 4086 - RNA, 19 nt, Artificial Sequence
  Description of Artificial Sequence: Synthetic oligonucleotide
ccagcacagcugcaggugc

SEQ ID NO: 4087 - RNA, 19 nt, Artificial Sequence
  Description of Artificial Sequence: Synthetic oligonucleotide
cccagcacagcugcaggug

SEQ ID NO: 4088 - RNA, 19 nt, Artificial Sequence
  Description of Artificial Sequence: Synthetic oligonucleotide
gcccagcacagcugcaggu

SEQ ID NO: 4089 - RNA, 19 nt, Artificial Sequence
  Description of Artificial Sequence: Synthetic oligonucleotide
ugcccagcacagcugcagg

SEQ ID NO: 4090 - RNA, 19 nt, Artificial Sequence
  Description of Artificial Sequence: Synthetic oligonucleotide
augcccagcacagcugcag

SEQ ID NO: 4091 - RNA, 19 nt, Artificial Sequence
  Description of Artificial Sequence: Synthetic oligonucleotide
caugcccagcacagcugca

SEQ ID NO: 4092 - RNA, 19 nt, Artificial Sequence
  Description of Artificial Sequence: Synthetic oligonucleotide
ccaugcccagcacagcugc

SEQ ID NO: 4093 - RNA, 19 nt, Artificial Sequence
  Description of Artificial Sequence: Synthetic oligonucleotide
gccaugcccagcacagcug

SEQ ID NO: 4094 - RNA, 19 nt, Artificial Sequence
  Description of Artificial Sequence: Synthetic oligonucleotide
ugccaugcccagcacagcu

SEQ ID NO: 4095 - RNA, 19 nt, Artificial Sequence
  Description of Artificial Sequence: Synthetic oligonucleotide
cugccaugcccagcacagc

SEQ ID NO: 4096 - RNA, 19 nt, Artificial Sequence
  Description of Artificial Sequence: Synthetic oligonucleotide
ccugccaugcccagcacag

SEQ ID NO: 4097 - RNA, 19 nt, Artificial Sequence
  Description of Artificial Sequence: Synthetic oligonucleotide
cccugccaugcccagcaca

SEQ ID NO: 4098 - RNA, 19 nt, Artificial Sequence
  Description of Artificial Sequence: Synthetic oligonucleotide
ucccugccaugcccagcac

SEQ ID NO: 4099 - RNA, 19 nt, Artificial Sequence
  Description of Artificial Sequence: Synthetic oligonucleotide
cucccugccaugcccagca

SEQ ID NO: 4100 - RNA, 19 nt, Artificial Sequence
  Description of Artificial Sequence: Synthetic oligonucleotide
ccucccugccaugcccagc

SEQ ID NO: 4101 - RNA, 19 nt, Artificial Sequence
  Description of Artificial Sequence: Synthetic oligonucleotide
cccucccugccaugcccag

SEQ ID NO: 4102 - RNA, 19 nt, Artificial Sequence
  Description of Artificial Sequence: Synthetic oligonucleotide
acccucccugccaugccca

SEQ ID NO: 4103 - RNA, 19 nt, Artificial Sequence
  Description of Artificial Sequence: Synthetic oligonucleotide
cacccucccugccaugccc

SEQ ID NO: 4104 - RNA, 19 nt, Artificial Sequence
  Description of Artificial Sequence: Synthetic oligonucleotide
gcacccucccugccaugcc

SEQ ID NO: 4105 - RNA, 19 nt, Artificial Sequence
  Description of Artificial Sequence: Synthetic oligonucleotide
agcacccucccugccaugc

SEQ ID NO: 4106 - RNA, 19 nt, Artificial Sequence
  Description of Artificial Sequence: Synthetic oligonucleotide
cagcacccucccugccaug

SEQ ID NO: 4107 - RNA, 19 nt, Artificial Sequence
  Description of Artificial Sequence: Synthetic oligonucleotide
gcagcacccucccugccau

SEQ ID NO: 4108 - RNA, 19 nt, Artificial Sequence
  Description of Artificial Sequence: Synthetic oligonucleotide
ugcagcacccucccugcca

SEQ ID NO: 4109 - RNA, 19 nt, Artificial Sequence
  Description of Artificial Sequence: Synthetic oligonucleotide
gugcagcacccucccugcc

SEQ ID NO: 4110 - RNA, 19 nt, Artificial Sequence
  Description of Artificial Sequence: Synthetic oligonucleotide
ggugcagcacccucccugc

SEQ ID NO: 4111 - RNA, 19 nt, Artificial Sequence
  Description of Artificial Sequence: Synthetic oligonucleotide
aggugcagcacccucccug

SEQ ID NO: 4112 - RNA, 19 nt, Artificial Sequence
  Description of Artificial Sequence: Synthetic oligonucleotide
gaggugcagcacccucccu

SEQ ID NO: 4113 - RNA, 19 nt, Artificial Sequence
  Description of Artificial Sequence: Synthetic oligonucleotide
ugaggugcagcacccuccc

SEQ ID NO: 4114 - RNA, 19 nt, Artificial Sequence
  Description of Artificial Sequence: Synthetic oligonucleotide
gugaggugcagcacccucc

SEQ ID NO: 4115 - RNA, 19 nt, Artificial Sequence
  Description of Artificial Sequence: Synthetic oligonucleotide
ugugaggugcagcacccuc

SEQ ID NO: 4116 - RNA, 19 nt, Artificial Sequence
  Description of Artificial Sequence: Synthetic oligonucleotide
gugugaggugcagcacccu

SEQ ID NO: 4117 - RNA, 19 nt, Artificial Sequence
  Description of Artificial Sequence: Synthetic oligonucleotide
ggugugaggugcagcaccc

SEQ ID NO: 4118 - RNA, 19 nt, Artificial Sequence
  Description of Artificial Sequence: Synthetic oligonucleotide
uggugugaggugcagcacc

SEQ ID NO: 4119 - RNA, 19 nt, Artificial Sequence
  Description of Artificial Sequence: Synthetic oligonucleotide
cuggugugaggugcagcac

SEQ ID NO: 4120 - RNA, 19 nt, Artificial Sequence
  Description of Artificial Sequence: Synthetic oligonucleotide
gcuggugugaggugcagca

SEQ ID NO: 4121 - RNA, 19 nt, Artificial Sequence
  Description of Artificial Sequence: Synthetic oligonucleotide
ggcuggugugaggugcagc

SEQ ID NO: 4122 - RNA, 19 nt, Artificial Sequence
  Description of Artificial Sequence: Synthetic oligonucleotide
gggcuggugugaggugcag

SEQ ID NO: 4123 - RNA, 19 nt, Artificial Sequence
  Description of Artificial Sequence: Synthetic oligonucleotide
ggggcuggugugaggugca

SEQ ID NO: 4124 - RNA, 19 nt, Artificial Sequence
  Description of Artificial Sequence: Synthetic oligonucleotide
aggggcuggugugaggugc

SEQ ID NO: 4125 - RNA, 19 nt, Artificial Sequence
  Description of Artificial Sequence: Synthetic oligonucleotide
caggggcuggugugaggug

SEQ ID NO: 4126 - RNA, 19 nt, Artificial Sequence
  Description of Artificial Sequence: Synthetic oligonucleotide
gcaggggcuggugugaggu

SEQ ID NO: 4127 - RNA, 19 nt, Artificial Sequence
  Description of Artificial Sequence: Synthetic oligonucleotide
agcaggggcuggugugagg

SEQ ID NO: 4128 - RNA, 19 nt, Artificial Sequence
  Description of Artificial Sequence: Synthetic oligonucleotide
cagcaggggcuggugugag

SEQ ID NO: 4129 - RNA, 19 nt, Artificial Sequence
  Description of Artificial Sequence: Synthetic oligonucleotide
acagcaggggcugguguga

SEQ ID NO: 4130 - RNA, 19 nt, Artificial Sequence
  Description of Artificial Sequence: Synthetic oligonucleotide
gacagcaggggcuggugug

SEQ ID NO: 4131 - RNA, 19 nt, Artificial Sequence
  Description of Artificial Sequence: Synthetic oligonucleotide
agacagcaggggcuggugu

SEQ ID NO: 4132 - RNA, 19 nt, Artificial Sequence
  Description of Artificial Sequence: Synthetic oligonucleotide
gagacagcaggggcuggug

SEQ ID NO: 4133 - RNA, 19 nt, Artificial Sequence
  Description of Artificial Sequence: Synthetic oligonucleotide
ggagacagcaggggcuggu

SEQ ID NO: 4134 - RNA, 19 nt, Artificial Sequence
  Description of Artificial Sequence: Synthetic oligonucleotide
aggagacagcaggggcugg

SEQ ID NO: 4135 - RNA, 19 nt, Artificial Sequence
  Description of Artificial Sequence: Synthetic oligonucleotide
gaggagacagcaggggcug

SEQ ID NO: 4136 - RNA, 19 nt, Artificial Sequence
  Description of Artificial Sequence: Synthetic oligonucleotide
ugaggagacagcaggggcu

SEQ ID NO: 4137 - RNA, 19 nt, Artificial Sequence
  Description of Artificial Sequence: Synthetic oligonucleotide
uugaggagacagcaggggc

SEQ ID NO: 4138 - RNA, 19 nt, Artificial Sequence
  Description of Artificial Sequence: Synthetic oligonucleotide
guugaggagacagcagggg

SEQ ID NO: 4139 - RNA, 19 nt, Artificial Sequence
  Description of Artificial Sequence: Synthetic oligonucleotide
gguugaggagacagcaggg

SEQ ID NO: 4140 - RNA, 19 nt, Artificial Sequence
  Description of Artificial Sequence: Synthetic oligonucleotide
ugguugaggagacagcagg

SEQ ID NO: 4141 - RNA, 19 nt, Artificial Sequence
  Description of Artificial Sequence: Synthetic oligonucleotide
uugguugaggagacagcag

SEQ ID NO: 4142 - RNA, 19 nt, Artificial Sequence
  Description of Artificial Sequence: Synthetic oligonucleotide
cuugguugaggagacagca

SEQ ID NO: 4143 - RNA, 19 nt, Artificial Sequence
  Description of Artificial Sequence: Synthetic oligonucleotide
ccuugguugaggagacagc

SEQ ID NO: 4144 - RNA, 19 nt, Artificial Sequence
  Description of Artificial Sequence: Synthetic oligonucleotide
cccuugguugaggagacag

SEQ ID NO: 4145 - RNA, 19 nt, Artificial Sequence
  Description of Artificial Sequence: Synthetic oligonucleotide
ccccuugguugaggagaca

SEQ ID NO: 4146 - RNA, 19 nt, Artificial Sequence
  Description of Artificial Sequence: Synthetic oligonucleotide
uccccuugguugaggagac

SEQ ID NO: 4147 - RNA, 19 nt, Artificial Sequence
  Description of Artificial Sequence: Synthetic oligonucleotide
cuccccuugguugaggaga

SEQ ID NO: 4148 - RNA, 19 nt, Artificial Sequence
  Description of Artificial Sequence: Synthetic oligonucleotide
ccuccccuugguugaggag

SEQ ID NO: 4149 - RNA, 19 nt, Artificial Sequence
  Description of Artificial Sequence: Synthetic oligonucleotide
cccuccccuugguugagga

SEQ ID NO: 4150 - RNA, 19 nt, Artificial Sequence
  Description of Artificial Sequence: Synthetic oligonucleotide
gcccuccccuugguugagg

SEQ ID NO: 4151 - RNA, 19 nt, Artificial Sequence
  Description of Artificial Sequence: Synthetic oligonucleotide
ggcccuccccuugguugag

SEQ ID NO: 4152 - RNA, 19 nt, Artificial Sequence
  Description of Artificial Sequence: Synthetic oligonucleotide
uggcccuccccuugguuga

SEQ ID NO: 4153 - RNA, 19 nt, Artificial Sequence
  Description of Artificial Sequence: Synthetic oligonucleotide
auggcccuccccuugguug

SEQ ID NO: 4154 - RNA, 19 nt, Artificial Sequence
  Description of Artificial Sequence: Synthetic oligonucleotide
cauggcccuccccuugguu

SEQ ID NO: 4155 - RNA, 19 nt, Artificial Sequence
  Description of Artificial Sequence: Synthetic oligonucleotide
acauggcccuccccuuggu

SEQ ID NO: 4156 - RNA, 19 nt, Artificial Sequence
  Description of Artificial Sequence: Synthetic oligonucleotide
gacauggcccuccccuugg

SEQ ID NO: 4157 - RNA, 19 nt, Artificial Sequence
  Description of Artificial Sequence: Synthetic oligonucleotide
ggacauggcccuccccuug

SEQ ID NO: 4158 - RNA, 19 nt, Artificial Sequence
  Description of Artificial Sequence: Synthetic oligonucleotide
gggacauggcccuccccuu

SEQ ID NO: 4159 - RNA, 19 nt, Artificial Sequence
  Description of Artificial Sequence: Synthetic oligonucleotide
agggacauggcccuccccu

SEQ ID NO: 4160 - RNA, 19 nt, Artificial Sequence
  Description of Artificial Sequence: Synthetic oligonucleotide
uagggacauggcccucccc

SEQ ID NO: 4161 - RNA, 19 nt, Artificial Sequence
  Description of Artificial Sequence: Synthetic oligonucleotide
auagggacauggcccuccc

SEQ ID NO: 4162 - RNA, 19 nt, Artificial Sequence
  Description of Artificial Sequence: Synthetic oligonucleotide
gauagggacauggcccucc

SEQ ID NO: 4163 - RNA, 19 nt, Artificial Sequence
  Description of Artificial Sequence: Synthetic oligonucleotide
ugauagggacauggcccuc

SEQ ID NO: 4164 - RNA, 19 nt, Artificial Sequence
  Description of Artificial Sequence: Synthetic oligonucleotide
cugauagggacauggcccu

SEQ ID NO: 4165 - RNA, 19 nt, Artificial Sequence
  Description of Artificial Sequence: Synthetic oligonucleotide
ucugauagggacauggccc

SEQ ID NO: 4166 - RNA, 19 nt, Artificial Sequence
  Description of Artificial Sequence: Synthetic oligonucleotide
aucugauagggacauggcc

SEQ ID NO: 4167 - RNA, 19 nt, Artificial Sequence
  Description of Artificial Sequence: Synthetic oligonucleotide
caucugauagggacauggc

SEQ ID NO: 4168 - RNA, 19 nt, Artificial Sequence
  Description of Artificial Sequence: Synthetic oligonucleotide
gcaucugauagggacaugg

SEQ ID NO: 4169 - RNA, 19 nt, Artificial Sequence
  Description of Artificial Sequence: Synthetic oligonucleotide
ggcaucugauagggacaug

SEQ ID NO: 4170 - RNA, 19 nt, Artificial Sequence
  Description of Artificial Sequence: Synthetic oligonucleotide
gggcaucugauagggacau

SEQ ID NO: 4171 - RNA, 19 nt, Artificial Sequence
  Description of Artificial Sequence: Synthetic oligonucleotide
agggcaucugauagggaca

SEQ ID NO: 4172 - RNA, 19 nt, Artificial Sequence
  Description of Artificial Sequence: Synthetic oligonucleotide
cagggcaucugauagggac

SEQ ID NO: 4173 - RNA, 19 nt, Artificial Sequence
  Description of Artificial Sequence: Synthetic oligonucleotide
ucagggcaucugauaggga

SEQ ID NO: 4174 - RNA, 19 nt, Artificial Sequence
  Description of Artificial Sequence: Synthetic oligonucleotide
uucagggcaucugauaggg

SEQ ID NO: 4175 - RNA, 19 nt, Artificial Sequence
  Description of Artificial Sequence: Synthetic oligonucleotide
cuucagggcaucugauagg

SEQ ID NO: 4176 - RNA, 19 nt, Artificial Sequence
  Description of Artificial Sequence: Synthetic oligonucleotide
ccuucagggcaucugauag

SEQ ID NO: 4177 - RNA, 19 nt, Artificial Sequence
  Description of Artificial Sequence: Synthetic oligonucleotide
cccuucagggcaucugaua

SEQ ID NO: 4178 - RNA, 19 nt, Artificial Sequence
  Description of Artificial Sequence: Synthetic oligonucleotide
gcccuucagggcaucugau

SEQ ID NO: 4179 - RNA, 19 nt, Artificial Sequence
  Description of Artificial Sequence: Synthetic oligonucleotide
cgcccuucagggcaucuga

SEQ ID NO: 4180 - RNA, 19 nt, Artificial Sequence
  Description of Artificial Sequence: Synthetic oligonucleotide
acgcccuucagggcaucug

SEQ ID NO: 4181 - RNA, 19 nt, Artificial Sequence
  Description of Artificial Sequence: Synthetic oligonucleotide
aacgcccuucagggcaucu

SEQ ID NO: 4182 - RNA, 19 nt, Artificial Sequence
  Description of Artificial Sequence: Synthetic oligonucleotide
uaacgcccuucagggcauc

SEQ ID NO: 4183 - RNA, 19 nt, Artificial Sequence
  Description of Artificial Sequence: Synthetic oligonucleotide
guaacgcccuucagggcau

SEQ ID NO: 4184 - RNA, 19 nt, Artificial Sequence
  Description of Artificial Sequence: Synthetic oligonucleotide
aguaacgcccuucagggca

SEQ ID NO: 4185 - RNA, 19 nt, Artificial Sequence
  Description of Artificial Sequence: Synthetic oligonucleotide
caguaacgcccuucagggc

SEQ ID NO: 4186 - RNA, 19 nt, Artificial Sequence
  Description of Artificial Sequence: Synthetic oligonucleotide
ucaguaacgcccuucaggg

SEQ ID NO: 4187 - RNA, 19 nt, Artificial Sequence
  Description of Artificial Sequence: Synthetic oligonucleotide
gucaguaacgcccuucagg

SEQ ID NO: 4188 - RNA, 19 nt, Artificial Sequence
  Description of Artificial Sequence: Synthetic oligonucleotide
ugucaguaacgcccuucag

SEQ ID NO: 4189 - RNA, 19 nt, Artificial Sequence
  Description of Artificial Sequence: Synthetic oligonucleotide
uugucaguaacgcccuuca

SEQ ID NO: 4190 - RNA, 19 nt, Artificial Sequence
  Description of Artificial Sequence: Synthetic oligonucleotide
guugucaguaacgcccuuc

SEQ ID NO: 4191 - RNA, 19 nt, Artificial Sequence
  Description of Artificial Sequence: Synthetic oligonucleotide
cguugucaguaacgcccuu

SEQ ID NO: 4192 - RNA, 19 nt, Artificial Sequence
  Description of Artificial Sequence: Synthetic oligonucleotide
acguugucaguaacgcccu

SEQ ID NO: 4193 - RNA, 19 nt, Artificial Sequence
  Description of Artificial Sequence: Synthetic oligonucleotide
cacguugucaguaacgccc

SEQ ID NO: 4194 - RNA, 19 nt, Artificial Sequence
  Description of Artificial Sequence: Synthetic oligonucleotide
ccacguugucaguaacgcc

SEQ ID NO: 4195 - RNA, 19 nt, Artificial Sequence
  Description of Artificial Sequence: Synthetic oligonucleotide
accacguugucaguaacgc

SEQ ID NO: 4196 - RNA, 19 nt, Artificial Sequence
  Description of Artificial Sequence: Synthetic oligonucleotide
caccacguugucaguaacg

SEQ ID NO: 4197 - RNA, 19 nt, Artificial Sequence
  Description of Artificial Sequence: Synthetic oligonucleotide
ccaccacguugucaguaac

SEQ ID NO: 4198 - RNA, 19 nt, Artificial Sequence
  Description of Artificial Sequence: Synthetic oligonucleotide
uccaccacguugucaguaa

SEQ ID NO: 4199 - RNA, 19 nt, Artificial Sequence
  Description of Artificial Sequence: Synthetic oligonucleotide
guccaccacguugucagua

SEQ ID NO: 4200 - RNA, 19 nt, Artificial Sequence
  Description of Artificial Sequence: Synthetic oligonucleotide
uguccaccacguugucagu

SEQ ID NO: 4201 - RNA, 19 nt, Artificial Sequence
  Description of Artificial Sequence: Synthetic oligonucleotide
guguccaccacguugucag

SEQ ID NO: 4202 - RNA, 19 nt, Artificial Sequence
  Description of Artificial Sequence: Synthetic oligonucleotide
uguguccaccacguuguca

SEQ ID NO: 4203 - RNA, 19 nt, Artificial Sequence
  Description of Artificial Sequence: Synthetic oligonucleotide
cuguguccaccacguuguc

SEQ ID NO: 4204 - RNA, 19 nt, Artificial Sequence
  Description of Artificial Sequence: Synthetic oligonucleotide
acuguguccaccacguugu

SEQ ID NO: 4205 - RNA, 19 nt, Artificial Sequence
  Description of Artificial Sequence: Synthetic oligonucleotide
cacuguguccaccacguug

SEQ ID NO: 4206 - RNA, 19 nt, Artificial Sequence
  Description of Artificial Sequence: Synthetic oligonucleotide
ccacuguguccaccacguu

SEQ ID NO: 4207 - RNA, 19 nt, Artificial Sequence
  Description of Artificial Sequence: Synthetic oligonucleotide
accacuguguccaccacgu

SEQ ID NO: 4208 - RNA, 19 nt, Artificial Sequence
  Description of Artificial Sequence: Synthetic oligonucleotide
caccacuguguccaccacg

SEQ ID NO: 4209 - RNA, 19 nt, Artificial Sequence
  Description of Artificial Sequence: Synthetic oligonucleotide
gcaccacuguguccaccac

SEQ ID NO: 4210 - RNA, 19 nt, Artificial Sequence
  Description of Artificial Sequence: Synthetic oligonucleotide
ugcaccacuguguccacca

SEQ ID NO: 4211 - RNA, 19 nt, Artificial Sequence
  Description of Artificial Sequence: Synthetic oligonucleotide
augcaccacuguguccacc

SEQ ID NO: 4212 - RNA, 19 nt, Artificial Sequence
  Description of Artificial Sequence: Synthetic oligonucleotide
aaugcaccacuguguccac

SEQ ID NO: 4213 - RNA, 19 nt, Artificial Sequence
  Description of Artificial Sequence: Synthetic oligonucleotide
uaaugcaccacugugucca

SEQ ID NO: 4214 - RNA, 19 nt, Artificial Sequence
  Description of Artificial Sequence: Synthetic oligonucleotide
guaaugcaccacugugucc

SEQ ID NO: 4215 - RNA, 19 nt, Artificial Sequence
  Description of Artificial Sequence: Synthetic oligonucleotide
cguaaugcaccacuguguc

SEQ ID NO: 4216 - RNA, 19 nt, Artificial Sequence
  Description of Artificial Sequence: Synthetic oligonucleotide
acguaaugcaccacugugu

SEQ ID NO: 4217 - RNA, 19 nt, Artificial Sequence
  Description of Artificial Sequence: Synthetic oligonucleotide
cacguaaugcaccacugug

SEQ ID NO: 4218 - RNA, 19 nt, Artificial Sequence
  Description of Artificial Sequence: Synthetic oligonucleotide
gcacguaaugcaccacugu

SEQ ID NO: 4219 - RNA, 19 nt, Artificial Sequence
  Description of Artificial Sequence: Synthetic oligonucleotide
ggcacguaaugcaccacug

SEQ ID NO: 4220 - RNA, 19 nt, Artificial Sequence
  Description of Artificial Sequence: Synthetic oligonucleotide
cggcacguaaugcaccacu

SEQ ID NO: 4221 - RNA, 19 nt, Artificial Sequence
  Description of Artificial Sequence: Synthetic oligonucleotide
gcggcacguaaugcaccac

SEQ ID NO: 4222 - RNA, 19 nt, Artificial Sequence
  Description of Artificial Sequence: Synthetic oligonucleotide
agcggcacguaaugcacca

SEQ ID NO: 4223 - RNA, 19 nt, Artificial Sequence
  Description of Artificial Sequence: Synthetic oligonucleotide
gagcggcacguaaugcacc

SEQ ID NO: 4224 - RNA, 19 nt, Artificial Sequence
  Description of Artificial Sequence: Synthetic oligonucleotide
ggagcggcacguaaugcac

SEQ ID NO: 4225 - RNA, 19 nt, Artificial Sequence
  Description of Artificial Sequence: Synthetic oligonucleotide
gggagcggcacguaaugca

SEQ ID NO: 4226 - RNA, 19 nt, Artificial Sequence
  Description of Artificial Sequence: Synthetic oligonucleotide
ggggagcggcacguaaugc

SEQ ID NO: 4227 - RNA, 19 nt, Artificial Sequence
  Description of Artificial Sequence: Synthetic oligonucleotide
uggggagcggcacguaaug

SEQ ID NO: 4228 - RNA, 19 nt, Artificial Sequence
  Description of Artificial Sequence: Synthetic oligonucleotide
cuggggagcggcacguaau

SEQ ID NO: 4229 - RNA, 19 nt, Artificial Sequence
  Description of Artificial Sequence: Synthetic oligonucleotide
ccuggggagcggcacguaa

SEQ ID NO: 4230 - RNA, 19 nt, Artificial Sequence
  Description of Artificial Sequence: Synthetic oligonucleotide
gccuggggagcggcacgua

SEQ ID NO: 4231 - RNA, 19 nt, Artificial Sequence
  Description of Artificial Sequence: Synthetic oligonucleotide
agccuggggagcggcacgu

SEQ ID NO: 4232 - RNA, 19 nt, Artificial Sequence
  Description of Artificial Sequence: Synthetic oligonucleotide
cagccuggggagcggcacg

SEQ ID NO: 4233 - RNA, 19 nt, Artificial Sequence
  Description of Artificial Sequence: Synthetic oligonucleotide
acagccuggggagcggcac

SEQ ID NO: 4234 - RNA, 19 nt, Artificial Sequence
  Description of Artificial Sequence: Synthetic oligonucleotide
gacagccuggggagcggca

SEQ ID NO: 4235 - RNA, 19 nt, Artificial Sequence
  Description of Artificial Sequence: Synthetic oligonucleotide
cgacagccuggggagcggc

SEQ ID NO: 4236 - RNA, 19 nt, Artificial Sequence
  Description of Artificial Sequence: Synthetic oligonucleotide
gcgacagccuggggagcgg

SEQ ID NO: 4237 - RNA, 19 nt, Artificial Sequence
  Description of Artificial Sequence: Synthetic oligonucleotide
agcgacagccuggggagcg

SEQ ID NO: 4238 - RNA, 19 nt, Artificial Sequence
  Description of Artificial Sequence: Synthetic oligonucleotide
cagcgacagccuggggagc

SEQ ID NO: 4239 - RNA, 19 nt, Artificial Sequence
  Description of Artificial Sequence: Synthetic oligonucleotide
ucagcgacagccuggggag

SEQ ID NO: 4240 - RNA, 19 nt, Artificial Sequence
  Description of Artificial Sequence: Synthetic oligonucleotide
aucagcgacagccugggga

SEQ ID NO: 4241 - RNA, 19 nt, Artificial Sequence
  Description of Artificial Sequence: Synthetic oligonucleotide
caucagcgacagccugggg

SEQ ID NO: 4242 - RNA, 19 nt, Artificial Sequence
  Description of Artificial Sequence: Synthetic oligonucleotide
ccaucagcgacagccuggg

SEQ ID NO: 4243 - RNA, 19 nt, Artificial Sequence
  Description of Artificial Sequence: Synthetic oligonucleotide
uccaucagcgacagccugg

SEQ ID NO: 4244 - RNA, 19 nt, Artificial Sequence
  Description of Artificial Sequence: Synthetic oligonucleotide
cuccaucagcgacagccug

SEQ ID NO: 4245 - RNA, 19 nt, Artificial Sequence
  Description of Artificial Sequence: Synthetic oligonucleotide
gcuccaucagcgacagccu

SEQ ID NO: 4246 - RNA, 19 nt, Artificial Sequence
  Description of Artificial Sequence: Synthetic oligonucleotide
ggcuccaucagcgacagcc

SEQ ID NO: 4247 - RNA, 19 nt, Artificial Sequence
  Description of Artificial Sequence: Synthetic oligonucleotide
gggcuccaucagcgacagc

SEQ ID NO: 4248 - RNA, 19 nt, Artificial Sequence
  Description of Artificial Sequence: Synthetic oligonucleotide
cgggcuccaucagcgacag

SEQ ID NO: 4249 - RNA, 19 nt, Artificial Sequence
  Description of Artificial Sequence: Synthetic oligonucleotide
ucgggcuccaucagcgaca

SEQ ID NO: 4250 - RNA, 19 nt, Artificial Sequence
  Description of Artificial Sequence: Synthetic oligonucleotide
cucgggcuccaucagcgac

SEQ ID NO: 4251 - RNA, 19 nt, Artificial Sequence
  Description of Artificial Sequence: Synthetic oligonucleotide
ucucgggcuccaucagcga

SEQ ID NO: 4252 - RNA, 19 nt, Artificial Sequence
  Description of Artificial Sequence: Synthetic oligonucleotide
cucucgggcuccaucagcg

SEQ ID NO: 4253 - RNA, 19 nt, Artificial Sequence
  Description of Artificial Sequence: Synthetic oligonucleotide
gcucucgggcuccaucagc

SEQ ID NO: 4254 - RNA, 19 nt, Artificial Sequence
  Description of Artificial Sequence: Synthetic oligonucleotide
cgcucucgggcuccaucag

SEQ ID NO: 4255 - RNA, 19 nt, Artificial Sequence
  Description of Artificial Sequence: Synthetic oligonucleotide
ucgcucucgggcuccauca

SEQ ID NO: 4256 - RNA, 19 nt, Artificial Sequence
  Description of Artificial Sequence: Synthetic oligonucleotide
uucgcucucgggcuccauc

SEQ ID NO: 4257 - RNA, 19 nt, Artificial Sequence
  Description of Artificial Sequence: Synthetic oligonucleotide
auucgcucucgggcuccau

SEQ ID NO: 4258 - RNA, 19 nt, Artificial Sequence
  Description of Artificial Sequence: Synthetic oligonucleotide
aauucgcucucgggcucca

SEQ ID NO: 4259 - RNA, 19 nt, Artificial Sequence
  Description of Artificial Sequence: Synthetic oligonucleotide
gaauucgcucucgggcucc

SEQ ID NO: 4260 - RNA, 19 nt, Artificial Sequence
  Description of Artificial Sequence: Synthetic oligonucleotide
ggaauucgcucucgggcuc

SEQ ID NO: 4261 - RNA, 19 nt, Artificial Sequence
  Description of Artificial Sequence: Synthetic oligonucleotide
cggaauucgcucucgggcu

SEQ ID NO: 4262 - RNA, 19 nt, Artificial Sequence
  Description of Artificial Sequence: Synthetic oligonucleotide
ccggaauucgcucucgggc

SEQ ID NO: 4263 - RNA, 19 nt, Artificial Sequence
  Description of Artificial Sequence: Synthetic oligonucleotide
cccggaauucgcucucggg

SEQ ID NO: 4264 - RNA, 19 nt, Artificial Sequence
  Description of Artificial Sequence: Synthetic oligonucleotide
ucccggaauucgcucucgg

SEQ ID NO: 4265 - RNA, 19 nt, Artificial Sequence
  Description of Artificial Sequence: Synthetic oligonucleotide
gucccggaauucgcucucg

SEQ ID NO: 4266 - RNA, 19 nt, Artificial Sequence
  Description of Artificial Sequence: Synthetic oligonucleotide
ugucccggaauucgcucuc

SEQ ID NO: 4267 - RNA, 19 nt, Artificial Sequence
  Description of Artificial Sequence: Synthetic oligonucleotide
augucccggaauucgcucu

SEQ ID NO: 4268 - RNA, 19 nt, Artificial Sequence
  Description of Artificial Sequence: Synthetic oligonucleotide
gaugucccggaauucgcuc

SEQ ID NO: 4269 - RNA, 19 nt, Artificial Sequence
  Description of Artificial Sequence: Synthetic oligonucleotide
cgaugucccggaauucgcu

SEQ ID NO: 4270 - RNA, 19 nt, Artificial Sequence
  Description of Artificial Sequence: Synthetic oligonucleotide
ucgaugucccggaauucgc

SEQ ID NO: 4271 - RNA, 19 nt, Artificial Sequence
  Description of Artificial Sequence: Synthetic oligonucleotide
gucgaugucccggaauucg

SEQ ID NO: 4272 - RNA, 19 nt, Artificial Sequence
  Description of Artificial Sequence: Synthetic oligonucleotide
ugucgaugucccggaauuc

SEQ ID NO: 4273 - RNA, 19 nt, Artificial Sequence
  Description of Artificial Sequence: Synthetic oligonucleotide
uugucgaugucccggaauu

SEQ ID NO: 4274 - RNA, 19 nt, Artificial Sequence
  Description of Artificial Sequence: Synthetic oligonucleotide
guugucgaugucccggaau

SEQ ID NO: 4275 - RNA, 19 nt, Artificial Sequence
  Description of Artificial Sequence: Synthetic oligonucleotide
gguugucgaugucccggaa

SEQ ID NO: 4276 - RNA, 19 nt, Artificial Sequence
  Description of Artificial Sequence: Synthetic oligonucleotide
ggguugucgaugucccgga

SEQ ID NO: 4277 - RNA, 19 nt, Artificial Sequence
  Description of Artificial Sequence: Synthetic oligonucleotide
uggguugucgaugucccgg

SEQ ID NO: 4278 - RNA, 19 nt, Artificial Sequence
  Description of Artificial Sequence: Synthetic oligonucleotide
guggguugucgaugucccg

SEQ ID NO: 4279 - RNA, 19 nt, Artificial Sequence
  Description of Artificial Sequence: Synthetic oligonucleotide
gguggguugucgauguccc

SEQ ID NO: 4280 - RNA, 19 nt, Artificial Sequence
  Description of Artificial Sequence: Synthetic oligonucleotide
ugguggguugucgaugucc

SEQ ID NO: 4281 - RNA, 19 nt, Artificial Sequence
  Description of Artificial Sequence: Synthetic oligonucleotide
cugguggguugucgauguc

SEQ ID NO: 4282 - RNA, 19 nt, Artificial Sequence
  Description of Artificial Sequence: Synthetic oligonucleotide
gcugguggguugucgaugu

SEQ ID NO: 4283 - RNA, 19 nt, Artificial Sequence
  Description of Artificial Sequence: Synthetic oligonucleotide
ggcugguggguugucgaug

SEQ ID NO: 4284 - RNA, 19 nt, Artificial Sequence
  Description of Artificial Sequence: Synthetic oligonucleotide
cggcugguggguugucgau

SEQ ID NO: 4285 - RNA, 19 nt, Artificial Sequence
  Description of Artificial Sequence: Synthetic oligonucleotide
ucggcugguggguugucga

SEQ ID NO: 4286 - RNA, 19 nt, Artificial Sequence
  Description of Artificial Sequence: Synthetic oligonucleotide
cucggcugguggguugucg

SEQ ID NO: 4287 - RNA, 19 nt, Artificial Sequence
  Description of Artificial Sequence: Synthetic oligonucleotide
ccucggcugguggguuguc

SEQ ID NO: 4288 - RNA, 19 nt, Artificial Sequence
  Description of Artificial Sequence: Synthetic oligonucleotide
accucggcugguggguugu

SEQ ID NO: 4289 - RNA, 19 nt, Artificial Sequence
  Description of Artificial Sequence: Synthetic oligonucleotide
gaccucggcugguggguug

SEQ ID NO: 4290 - RNA, 19 nt, Artificial Sequence
  Description of Artificial Sequence: Synthetic oligonucleotide
cgaccucggcugguggguu

SEQ ID NO: 4291 - RNA, 19 nt, Artificial Sequence
  Description of Artificial Sequence: Synthetic oligonucleotide
ucgaccucggcuggugggu

SEQ ID NO: 4292 - RNA, 19 nt, Artificial Sequence
  Description of Artificial Sequence: Synthetic oligonucleotide
cucgaccucggcugguggg

SEQ ID NO: 4293 - RNA, 19 nt, Artificial Sequence
  Description of Artificial Sequence: Synthetic oligonucleotide
gcucgaccucggcuggugg

SEQ ID NO: 4294 - RNA, 19 nt, Artificial Sequence
  Description of Artificial Sequence: Synthetic oligonucleotide
cgcucgaccucggcuggug

SEQ ID NO: 4295 - RNA, 19 nt, Artificial Sequence
  Description of Artificial Sequence: Synthetic oligonucleotide
gcgcucgaccucggcuggu

SEQ ID NO: 4296 - RNA, 19 nt, Artificial Sequence
  Description of Artificial Sequence: Synthetic oligonucleotide
ggcgcucgaccucggcugg

SEQ ID NO: 4297 - RNA, 19 nt, Artificial Sequence
  Description of Artificial Sequence: Synthetic oligonucleotide
cggcgcucgaccucggcug

SEQ ID NO: 4298 - RNA, 19 nt, Artificial Sequence
  Description of Artificial Sequence: Synthetic oligonucleotide
ccggcgcucgaccucggcu

SEQ ID NO: 4299 - RNA, 19 nt, Artificial Sequence
  Description of Artificial Sequence: Synthetic oligonucleotide
cccggcgcucgaccucggc

SEQ ID NO: 4300 - RNA, 19 nt, Artificial Sequence
  Description of Artificial Sequence: Synthetic oligonucleotide
ucccggcgcucgaccucgg

SEQ ID NO: 4301 - RNA, 19 nt, Artificial Sequence
  Description of Artificial Sequence: Synthetic oligonucleotide
cucccggcgcucgaccucg

SEQ ID NO: 4302 - RNA, 19 nt, Artificial Sequence
  Description of Artificial Sequence: Synthetic oligonucleotide
ccucccggcgcucgaccuc

SEQ ID NO: 4303 - RNA, 19 nt, Artificial Sequence
  Description of Artificial Sequence: Synthetic oligonucleotide
gccucccggcgcucgaccu

SEQ ID NO: 4304 - RNA, 19 nt, Artificial Sequence
  Description of Artificial Sequence: Synthetic oligonucleotide
cgccucccggcgcucgacc

SEQ ID NO: 4305 - RNA, 19 nt, Artificial Sequence
  Description of Artificial Sequence: Synthetic oligonucleotide
ccgccucccggcgcucgac

SEQ ID NO: 4306 - RNA, 19 nt, Artificial Sequence
  Description of Artificial Sequence: Synthetic oligonucleotide
uccgccucccggcgcucga

SEQ ID NO: 4307 - RNA, 19 nt, Artificial Sequence
  Description of Artificial Sequence: Synthetic oligonucleotide
cuccgccucccggcgcucg

SEQ ID NO: 4308 - RNA, 19 nt, Artificial Sequence
  Description of Artificial Sequence: Synthetic oligonucleotide
gcuccgccucccggcgcuc

SEQ ID NO: 4309 - RNA, 19 nt, Artificial Sequence
  Description of Artificial Sequence: Synthetic oligonucleotide
cgcuccgccucccggcgcu

SEQ ID NO: 4310 - RNA, 19 nt, Artificial Sequence
  Description of Artificial Sequence: Synthetic oligonucleotide
gcgcuccgccucccggcgc

SEQ ID NO: 4311 - RNA, 19 nt, Artificial Sequence
  Description of Artificial Sequence: Synthetic oligonucleotide
ugcgcuccgccucccggcg

SEQ ID NO: 4312 - RNA, 19 nt, Artificial Sequence
  Description of Artificial Sequence: Synthetic oligonucleotide
cugcgcuccgccucccggc

SEQ ID NO: 4313 - RNA, 19 nt, Artificial Sequence
  Description of Artificial Sequence: Synthetic oligonucleotide
ucugcgcuccgccucccgg

SEQ ID NO: 4314 - RNA, 19 nt, Artificial Sequence
  Description of Artificial Sequence: Synthetic oligonucleotide
cucugcgcuccgccucccg

SEQ ID NO: 4315 - RNA, 19 nt, Artificial Sequence
  Description of Artificial Sequence: Synthetic oligonucleotide
gcucugcgcuccgccuccc

SEQ ID NO: 4316 - RNA, 19 nt, Artificial Sequence
  Description of Artificial Sequence: Synthetic oligonucleotide
cgcucugcgcuccgccucc

SEQ ID NO: 4317 - RNA, 19 nt, Artificial Sequence
  Description of Artificial Sequence: Synthetic oligonucleotide
acgcucugcgcuccgccuc

SEQ ID NO: 4318 - RNA, 19 nt, Artificial Sequence
  Description of Artificial Sequence: Synthetic oligonucleotide
gacgcucugcgcuccgccu

SEQ ID NO: 4319 - RNA, 19 nt, Artificial Sequence
  Description of Artificial Sequence: Synthetic oligonucleotide
agacgcucugcgcuccgcc

SEQ ID NO: 4320 - RNA, 19 nt, Artificial Sequence
  Description of Artificial Sequence: Synthetic oligonucleotide
cagacgcucugcgcuccgc

SEQ ID NO: 4321 - RNA, 19 nt, Artificial Sequence
  Description of Artificial Sequence: Synthetic oligonucleotide
ccagacgcucugcgcuccg

SEQ ID NO: 4322 - RNA, 19 nt, Artificial Sequence
  Description of Artificial Sequence: Synthetic oligonucleotide
cccagacgcucugcgcucc

SEQ ID NO: 4323 - RNA, 19 nt, Artificial Sequence
  Description of Artificial Sequence: Synthetic oligonucleotide
ccccagacgcucugcgcuc

SEQ ID NO: 4324 - RNA, 19 nt, Artificial Sequence
  Description of Artificial Sequence: Synthetic oligonucleotide
gccccagacgcucugcgcu

SEQ ID NO: 4325 - RNA, 19 nt, Artificial Sequence
  Description of Artificial Sequence: Synthetic oligonucleotide
cgccccagacgcucugcgc

SEQ ID NO: 4326 - RNA, 19 nt, Artificial Sequence
  Description of Artificial Sequence: Synthetic oligonucleotide
gcgccccagacgcucugcg

SEQ ID NO: 4327 - RNA, 19 nt, Artificial Sequence
  Description of Artificial Sequence: Synthetic oligonucleotide
ggcgccccagacgcucugc

SEQ ID NO: 4328 - RNA, 19 nt, Artificial Sequence
  Description of Artificial Sequence: Synthetic oligonucleotide
cggcgccccagacgcucug

SEQ ID NO: 4329 - RNA, 19 nt, Artificial Sequence
  Description of Artificial Sequence: Synthetic oligonucleotide
acggcgccccagacgcucu

SEQ ID NO: 4330 - RNA, 19 nt, Artificial Sequence
  Description of Artificial Sequence: Synthetic oligonucleotide
gacggcgccccagacgcuc

SEQ ID NO: 4331 - RNA, 19 nt, Artificial Sequence
  Description of Artificial Sequence: Synthetic oligonucleotide
ggacggcgccccagacgcu

SEQ ID NO: 4332 - RNA, 19 nt, Artificial Sequence
  Description of Artificial Sequence: Synthetic oligonucleotide
cggacggcgccccagacgc

SEQ ID NO: 4333 - RNA, 19 nt, Artificial Sequence
  Description of Artificial Sequence: Synthetic oligonucleotide
gcggacggcgccccagacg

SEQ ID NO: 4334 - RNA, 19 nt, Artificial Sequence
  Description of Artificial Sequence: Synthetic oligonucleotide
ggcggacggcgccccagac

SEQ ID NO: 4335 - RNA, 19 nt, Artificial Sequence
  Description of Artificial Sequence: Synthetic oligonucleotide
cggcggacggcgccccaga

SEQ ID NO: 4336 - RNA, 19 nt, Artificial Sequence
  Description of Artificial Sequence: Synthetic oligonucleotide
ccggcggacggcgccccag

SEQ ID NO: 4337 - RNA, 19 nt, Artificial Sequence
  Description of Artificial Sequence: Synthetic oligonucleotide
gccggcggacggcgcccca

SEQ ID NO: 4338 - RNA, 19 nt, Artificial Sequence
  Description of Artificial Sequence: Synthetic oligonucleotide
ggccggcggacggcgcccc

SEQ ID NO: 4339 - RNA, 19 nt, Artificial Sequence
  Description of Artificial Sequence: Synthetic oligonucleotide
gggccggcggacggcgccc

SEQ ID NO: 4340 - RNA, 19 nt, Artificial Sequence
  Description of Artificial Sequence: Synthetic oligonucleotide
cgggccggcggacggcgcc

SEQ ID NO: 4341 - RNA, 19 nt, Artificial Sequence
  Description of Artificial Sequence: Synthetic oligonucleotide
ccgggccggcggacggcgc

SEQ ID NO: 4342 - RNA, 19 nt, Artificial Sequence
  Description of Artificial Sequence: Synthetic oligonucleotide
uccgggccggcggacggcg

SEQ ID NO: 4343 - RNA, 19 nt, Artificial Sequence
  Description of Artificial Sequence: Synthetic oligonucleotide
cuccgggccggcggacggc

SEQ ID NO: 4344 - RNA, 19 nt, Artificial Sequence
  Description of Artificial Sequence: Synthetic oligonucleotide
gcuccgggccggcggacgg

SEQ ID NO: 4345 - RNA, 19 nt, Artificial Sequence
  Description of Artificial Sequence: Synthetic oligonucleotide
ggcuccgggccggcggacg

SEQ ID NO: 4346 - RNA, 19 nt, Artificial Sequence
  Description of Artificial Sequence: Synthetic oligonucleotide
gggcuccgggccggcggac

SEQ ID NO: 4347 - RNA, 19 nt, Artificial Sequence
  Description of Artificial Sequence: Synthetic oligonucleotide
cgggcuccgggccggcgga

SEQ ID NO: 4348 - RNA, 19 nt, Artificial Sequence
  Description of Artificial Sequence: Synthetic oligonucleotide
gcgggcuccgggccggcgg

SEQ ID NO: 4349 - RNA, 19 nt, Artificial Sequence
  Description of Artificial Sequence: Synthetic oligonucleotide
ggcgggcuccgggccggcg

SEQ ID NO: 4350 - RNA, 19 nt, Artificial Sequence
  Description of Artificial Sequence: Synthetic oligonucleotide
gggcgggcuccgggccggc

SEQ ID NO: 4351 - RNA, 19 nt, Artificial Sequence
  Description of Artificial Sequence: Synthetic oligonucleotide
ggggcgggcuccgggccgg

SEQ ID NO: 4352 - RNA, 19 nt, Artificial Sequence
  Description of Artificial Sequence: Synthetic oligonucleotide
cggggcgggcuccgggccg

SEQ ID NO: 4353 - RNA, 19 nt, Artificial Sequence
  Description of Artificial Sequence: Synthetic oligonucleotide
gcggggcgggcuccgggcc

SEQ ID NO: 4354 - RNA, 19 nt, Artificial Sequence
  Description of Artificial Sequence: Synthetic oligonucleotide
cgcggggcgggcuccgggc

SEQ ID NO: 4355 - RNA, 19 nt, Artificial Sequence
  Description of Artificial Sequence: Synthetic oligonucleotide
acgcggggcgggcuccggg

SEQ ID NO: 4356 - RNA, 19 nt, Artificial Sequence
  Description of Artificial Sequence: Synthetic oligonucleotide
gacgcggggcgggcuccgg

SEQ ID NO: 4357 - RNA, 19 nt, Artificial Sequence
  Description of Artificial Sequence: Synthetic oligonucleotide
agacgcggggcgggcuccg

SEQ ID NO: 4358 - RNA, 19 nt, Artificial Sequence
  Description of Artificial Sequence: Synthetic oligonucleotide
gagacgcggggcgggcucc

SEQ ID NO: 4359 - RNA, 19 nt, Artificial Sequence
  Description of Artificial Sequence: Synthetic oligonucleotide
cgagacgcggggcgggcuc

SEQ ID NO: 4360 - RNA, 19 nt, Artificial Sequence
  Description of Artificial Sequence: Synthetic oligonucleotide
gcgagacgcggggcgggcu

SEQ ID NO: 4361 - RNA, 19 nt, Artificial Sequence
  Description of Artificial Sequence: Synthetic oligonucleotide
ugcgagacgcggggcgggc

SEQ ID NO: 4362 - RNA, 19 nt, Artificial Sequence
  Description of Artificial Sequence: Synthetic oligonucleotide
gugcgagacgcggggcggg

SEQ ID NO: 4363 - RNA, 19 nt, Artificial Sequence
  Description of Artificial Sequence: Synthetic oligonucleotide
ugugcgagacgcggggcgg

SEQ ID NO: 4364 - RNA, 19 nt, Artificial Sequence
  Description of Artificial Sequence: Synthetic oligonucleotide
cugugcgagacgcggggcg

SEQ ID NO: 4365 - RNA, 19 nt, Artificial Sequence
  Description of Artificial Sequence: Synthetic oligonucleotide
gcugugcgagacgcggggc

SEQ ID NO: 4366 - RNA, 19 nt, Artificial Sequence
  Description of Artificial Sequence: Synthetic oligonucleotide
ggcugugcgagacgcgggg

SEQ ID NO: 4367 - RNA, 19 nt, Artificial Sequence
  Description of Artificial Sequence: Synthetic oligonucleotide
gggcugugcgagacgcggg

SEQ ID NO: 4368 - RNA, 19 nt, Artificial Sequence
  Description of Artificial Sequence: Synthetic oligonucleotide
ggggcugugcgagacgcgg

SEQ ID NO: 4369 - RNA, 19 nt, Artificial Sequence
  Description of Artificial Sequence: Synthetic oligonucleotide
cggggcugugcgagacgcg

SEQ ID NO: 4370 - RNA, 19 nt, Artificial Sequence
  Description of Artificial Sequence: Synthetic oligonucleotide
gcggggcugugcgagacgc

SEQ ID NO: 4371 - RNA, 19 nt, Artificial Sequence
  Description of Artificial Sequence: Synthetic oligonucleotide
ggcggggcugugcgagacg

SEQ ID NO: 4372 - RNA, 19 nt, Artificial Sequence
  Description of Artificial Sequence: Synthetic oligonucleotide
cggcggggcugugcgagac

SEQ ID NO: 4373 - RNA, 19 nt, Artificial Sequence
  Description of Artificial Sequence: Synthetic oligonucleotide
gcggcggggcugugcgaga

SEQ ID NO: 4374 - RNA, 19 nt, Artificial Sequence
  Description of Artificial Sequence: Synthetic oligonucleotide
ugcggcggggcugugcgag

SEQ ID NO: 4375 - RNA, 19 nt, Artificial Sequence
  Description of Artificial Sequence: Synthetic oligonucleotide
cugcggcggggcugugcga

SEQ ID NO: 4376 - RNA, 19 nt, Artificial Sequence
  Description of Artificial Sequence: Synthetic oligonucleotide
gcugcggcggggcugugcg

SEQ ID NO: 4377 - RNA, 19 nt, Artificial Sequence
  Description of Artificial Sequence: Synthetic oligonucleotide
ggcugcggcggggcugugc

SEQ ID NO: 4378 - RNA, 19 nt, Artificial Sequence
  Description of Artificial Sequence: Synthetic oligonucleotide
aggcugcggcggggcugug

SEQ ID NO: 4379 - RNA, 19 nt, Artificial Sequence
  Description of Artificial Sequence: Synthetic oligonucleotide
caggcugcggcggggcugu

SEQ ID NO: 4380 - RNA, 19 nt, Artificial Sequence
  Description of Artificial Sequence: Synthetic oligonucleotide
gcaggcugcggcggggcug

SEQ ID NO: 4381 - RNA, 19 nt, Artificial Sequence
  Description of Artificial Sequence: Synthetic oligonucleotide
cgcaggcugcggcggggcu

SEQ ID NO: 4382 - RNA, 19 nt, Artificial Sequence
  Description of Artificial Sequence: Synthetic oligonucleotide
gcgcaggcugcggcggggc

SEQ ID NO: 4383 - RNA, 19 nt, Artificial Sequence
  Description of Artificial Sequence: Synthetic oligonucleotide
ugcgcaggcugcggcgggg

SEQ ID NO: 4384 - RNA, 19 nt, Artificial Sequence
  Description of Artificial Sequence: Synthetic oligonucleotide
cugcgcaggcugcggcggg

SEQ ID NO: 4385 - RNA, 19 nt, Artificial Sequence
  Description of Artificial Sequence: Synthetic oligonucleotide
gcugcgcaggcugcggcgg

SEQ ID NO: 4386 - RNA, 19 nt, Artificial Sequence
  Description of Artificial Sequence: Synthetic oligonucleotide
cgcugcgcaggcugcggcg

SEQ ID NO: 4387 - RNA, 19 nt, Artificial Sequence
  Description of Artificial Sequence: Synthetic oligonucleotide
gcgcugcgcaggcugcggc

SEQ ID NO: 4388 - RNA, 19 nt, Artificial Sequence
  Description of Artificial Sequence: Synthetic oligonucleotide
cgcgcugcgcaggcugcgg

SEQ ID NO: 4389 - RNA, 19 nt, Artificial Sequence
  Description of Artificial Sequence: Synthetic oligonucleotide
gcgcgcugcgcaggcugcg

SEQ ID NO: 4390 - RNA, 19 nt, Artificial Sequence
  Description of Artificial Sequence: Synthetic oligonucleotide
ugcgcgcugcgcaggcugc

SEQ ID NO: 4391 - RNA, 19 nt, Artificial Sequence
  Description of Artificial Sequence: Synthetic oligonucleotide
cugcgcgcugcgcaggcug

SEQ ID NO: 4392 - RNA, 19 nt, Artificial Sequence
  Description of Artificial Sequence: Synthetic oligonucleotide
ucugcgcgcugcgcaggcu

SEQ ID NO: 4393 - RNA, 19 nt, Artificial Sequence
  Description of Artificial Sequence: Synthetic oligonucleotide
cucugcgcgcugcgcaggc

SEQ ID NO: 4394 - RNA, 19 nt, Artificial Sequence
  Description of Artificial Sequence: Synthetic oligonucleotide
gcucugcgcgcugcgcagg

SEQ ID NO: 4395 - RNA, 19 nt, Artificial Sequence
  Description of Artificial Sequence: Synthetic oligonucleotide
ggcucugcgcgcugcgcag

SEQ ID NO: 4396 - RNA, 19 nt, Artificial Sequence
  Description of Artificial Sequence: Synthetic oligonucleotide
gggcucugcgcgcugcgca

SEQ ID NO: 4397 - RNA, 19 nt, Artificial Sequence
  Description of Artificial Sequence: Synthetic oligonucleotide
ggggcucugcgcgcugcgc

SEQ ID NO: 4398 - RNA, 19 nt, Artificial Sequence
  Description of Artificial Sequence: Synthetic oligonucleotide
cggggcucugcgcgcugcg

SEQ ID NO: 4399 - RNA, 19 nt, Artificial Sequence
  Description of Artificial Sequence: Synthetic oligonucleotide
ccggggcucugcgcgcugc

SEQ ID NO: 4400 - RNA, 19 nt, Artificial Sequence
  Description of Artificial Sequence: Synthetic oligonucleotide
gccggggcucugcgcgcug

SEQ ID NO: 4401 - RNA, 19 nt, Artificial Sequence
  Description of Artificial Sequence: Synthetic oligonucleotide
cgccggggcucugcgcgcu

SEQ ID NO: 4402 - RNA, 19 nt, Artificial Sequence
  Description of Artificial Sequence: Synthetic oligonucleotide
gcgccggggcucugcgcgc

SEQ ID NO: 4403 - RNA, 19 nt, Artificial Sequence
  Description of Artificial Sequence: Synthetic oligonucleotide
cgcgccggggcucugcgcg

SEQ ID NO: 4404 - RNA, 19 nt, Artificial Sequence
  Description of Artificial Sequence: Synthetic oligonucleotide
gcgcgccggggcucugcgc

SEQ ID NO: 4405 - RNA, 19 nt, Artificial Sequence
  Description of Artificial Sequence: Synthetic oligonucleotide
ggcgcgccggggcucugcg

SEQ ID NO: 4406 - RNA, 19 nt, Artificial Sequence
  Description of Artificial Sequence: Synthetic oligonucleotide
gggcgcgccggggcucugc

SEQ ID NO: 4407 - RNA, 19 nt, Artificial Sequence
  Description of Artificial Sequence: Synthetic oligonucleotide
ggggcgcgccggggcucug

SEQ ID NO: 4408 - RNA, 19 nt, Artificial Sequence
  Description of Artificial Sequence: Synthetic oligonucleotide
gggggcgcgccggggcucu

SEQ ID NO: 4409 - RNA, 19 nt, Artificial Sequence
  Description of Artificial Sequence: Synthetic oligonucleotide
ggggggcgcgccggggcuc

SEQ ID NO: 4410 - RNA, 19 nt, Artificial Sequence
  Description of Artificial Sequence: Synthetic oligonucleotide
cggggggcgcgccggggcu

SEQ ID NO: 4411 - RNA, 19 nt, Artificial Sequence
  Description of Artificial Sequence: Synthetic oligonucleotide
ccggggggcgcgccggggc

SEQ ID NO: 4412 - RNA, 19 nt, Artificial Sequence
  Description of Artificial Sequence: Synthetic oligonucleotide
gccggggggcgcgccgggg

SEQ ID NO: 4413 - RNA, 19 nt, Artificial Sequence
  Description of Artificial Sequence: Synthetic oligonucleotide
ggccggggggcgcgccggg

SEQ ID NO: 4414 - RNA, 19 nt, Artificial Sequence
  Description of Artificial Sequence: Synthetic oligonucleotide
gggccggggggcgcgccgg

SEQ ID NO: 4415 - RNA, 19 nt, Artificial Sequence
  Description of Artificial Sequence: Synthetic oligonucleotide
cgggccggggggcgcgccg

SEQ ID NO: 4416 - RNA, 19 nt, Artificial Sequence
  Description of Artificial Sequence: Synthetic oligonucleotide
ccgggccggggggcgcgcc

SEQ ID NO: 4417 - RNA, 19 nt, Artificial Sequence
  Description of Artificial Sequence: Synthetic oligonucleotide
cccgggccggggggcgcgc

SEQ ID NO: 4418 - RNA, 19 nt, Artificial Sequence
  Description of Artificial Sequence: Synthetic oligonucleotide
gcccgggccggggggcgcg

SEQ ID NO: 4419 - RNA, 19 nt, Artificial Sequence
  Description of Artificial Sequence: Synthetic oligonucleotide
ggcccgggccggggggcgc

SEQ ID NO: 4420 - RNA, 19 nt, Artificial Sequence
  Description of Artificial Sequence: Synthetic oligonucleotide
aggcccgggccggggggcg

SEQ ID NO: 4421 - RNA, 19 nt, Artificial Sequence
  Description of Artificial Sequence: Synthetic oligonucleotide
caggcccgggccggggggc

SEQ ID NO: 4422 - RNA, 19 nt, Artificial Sequence
  Description of Artificial Sequence: Synthetic oligonucleotide
ccaggcccgggccgggggg

SEQ ID NO: 4423 - RNA, 19 nt, Artificial Sequence
  Description of Artificial Sequence: Synthetic oligonucleotide
uccaggcccgggccggggg

SEQ ID NO: 4424 - RNA, 19 nt, Artificial Sequence
  Description of Artificial Sequence: Synthetic oligonucleotide
cuccaggcccgggccgggg

SEQ ID NO: 4425 - RNA, 19 nt, Artificial Sequence
  Description of Artificial Sequence: Synthetic oligonucleotide
ccuccaggcccgggccggg

SEQ ID NO: 4426 - RNA, 19 nt, Artificial Sequence
  Description of Artificial Sequence: Synthetic oligonucleotide
uccuccaggcccgggccgg

SEQ ID NO: 4427 - RNA, 19 nt, Artificial Sequence
  Description of Artificial Sequence: Synthetic oligonucleotide
guccuccaggcccgggccg

SEQ ID NO: 4428 - RNA, 19 nt, Artificial Sequence
  Description of Artificial Sequence: Synthetic oligonucleotide
cguccuccaggcccgggcc

SEQ ID NO: 4429 - RNA, 19 nt, Artificial Sequence
  Description of Artificial Sequence: Synthetic oligonucleotide
ucguccuccaggcccgggc

SEQ ID NO: 4430 - RNA, 19 nt, Artificial Sequence
  Description of Artificial Sequence: Synthetic oligonucleotide
uucguccuccaggcccggg

SEQ ID NO: 4431 - RNA, 19 nt, Artificial Sequence
  Description of Artificial Sequence: Synthetic oligonucleotide
cuucguccuccaggcccgg

SEQ ID NO: 4432 - RNA, 19 nt, Artificial Sequence
  Description of Artificial Sequence: Synthetic oligonucleotide
acuucguccuccaggcccg

SEQ ID NO: 4433 - RNA, 19 nt, Artificial Sequence
  Description of Artificial Sequence: Synthetic oligonucleotide
gacuucguccuccaggccc

SEQ ID NO: 4434 - RNA, 19 nt, Artificial Sequence
  Description of Artificial Sequence: Synthetic oligonucleotide
cgacuucguccuccaggcc

SEQ ID NO: 4435 - RNA, 19 nt, Artificial Sequence
  Description of Artificial Sequence: Synthetic oligonucleotide
gcgacuucguccuccaggc

SEQ ID NO: 4436 - RNA, 19 nt, Artificial Sequence
  Description of Artificial Sequence: Synthetic oligonucleotide
ggcgacuucguccuccagg

SEQ ID NO: 4437 - RNA, 19 nt, Artificial Sequence
  Description of Artificial Sequence: Synthetic oligonucleotide
uggcgacuucguccuccag

SEQ ID NO: 4438 - RNA, 19 nt, Artificial Sequence
  Description of Artificial Sequence: Synthetic oligonucleotide
guggcgacuucguccucca

SEQ ID NO: 4439 - RNA, 19 nt, Artificial Sequence
  Description of Artificial Sequence: Synthetic oligonucleotide
cguggcgacuucguccucc

SEQ ID NO: 4440 - RNA, 19 nt, Artificial Sequence
  Description of Artificial Sequence: Synthetic oligonucleotide
gcguggcgacuucguccuc

SEQ ID NO: 4441 - RNA, 19 nt, Artificial Sequence
  Description of Artificial Sequence: Synthetic oligonucleotide
ggcguggcgacuucguccu

SEQ ID NO: 4442 - RNA, 19 nt, Artificial Sequence
  Description of Artificial Sequence: Synthetic oligonucleotide
gggcguggcgacuucgucc

SEQ ID NO: 4443 - RNA, 19 nt, Artificial Sequence
  Description of Artificial Sequence: Synthetic oligonucleotide
cgggcguggcgacuucguc

SEQ ID NO: 4444 - RNA, 19 nt, Artificial Sequence
  Description of Artificial Sequence: Synthetic oligonucleotide
gcgggcguggcgacuucgu

SEQ ID NO: 4445 - RNA, 19 nt, Artificial Sequence
  Description of Artificial Sequence: Synthetic oligonucleotide
ugcgggcguggcgacuucg

SEQ ID NO: 4446 - RNA, 19 nt, Artificial Sequence
  Description of Artificial Sequence: Synthetic oligonucleotide
cugcgggcguggcgacuuc

SEQ ID NO: 4447 - RNA, 19 nt, Artificial Sequence
  Description of Artificial Sequence: Synthetic oligonucleotide
gcugcgggcguggcgacuu

SEQ ID NO: 4448 - RNA, 19 nt, Artificial Sequence
  Description of Artificial Sequence: Synthetic oligonucleotide
cgcugcgggcguggcgacu

SEQ ID NO: 4449 - RNA, 19 nt, Artificial Sequence
  Description of Artificial Sequence: Synthetic oligonucleotide
gcgcugcgggcguggcgac

SEQ ID NO: 4450 - RNA, 19 nt, Artificial Sequence
  Description of Artificial Sequence: Synthetic oligonucleotide
ggcgcugcgggcguggcga

SEQ ID NO: 4451 - RNA, 19 nt, Artificial Sequence
  Description of Artificial Sequence: Synthetic oligonucleotide
cggcgcugcgggcguggcg

SEQ ID NO: 4452 - RNA, 19 nt, Artificial Sequence
  Description of Artificial Sequence: Synthetic oligonucleotide
gcggcgcugcgggcguggc

SEQ ID NO: 4453 - RNA, 19 nt, Artificial Sequence
  Description of Artificial Sequence: Synthetic oligonucleotide
cgcggcgcugcgggcgugg

SEQ ID NO: 4454 - RNA, 19 nt, Artificial Sequence
  Description of Artificial Sequence: Synthetic oligonucleotide
gcgcggcgcugcgggcgug

SEQ ID NO: 4455 - RNA, 19 nt, Artificial Sequence
  Description of Artificial Sequence: Synthetic oligonucleotide
ggcgcggcgcugcgggcgu

SEQ ID NO: 4456 - RNA, 19 nt, Artificial Sequence
  Description of Artificial Sequence: Synthetic oligonucleotide
gggcgcggcgcugcgggcg

SEQ ID NO: 4457 - RNA, 19 nt, Artificial Sequence
  Description of Artificial Sequence: Synthetic oligonucleotide
cgggcgcggcgcugcgggc

SEQ ID NO: 4458 - RNA, 19 nt, Artificial Sequence
  Description of Artificial Sequence: Synthetic oligonucleotide
ccgggcgcggcgcugcggg

SEQ ID NO: 4459 - RNA, 19 nt, Artificial Sequence
  Description of Artificial Sequence: Synthetic oligonucleotide
cccgggcgcggcgcugcgg

SEQ ID NO: 4460 - RNA, 19 nt, Artificial Sequence
  Description of Artificial Sequence: Synthetic oligonucleotide
gcccgggcgcggcgcugcg

SEQ ID NO: 4461 - RNA, 19 nt, Artificial Sequence
  Description of Artificial Sequence: Synthetic oligonucleotide
agcccgggcgcggcgcugc

SEQ ID NO: 4462 - RNA, 19 nt, Artificial Sequence
  Description of Artificial Sequence: Synthetic oligonucleotide
aagcccgggcgcggcgcug

SEQ ID NO: 4463 - RNA, 19 nt, Artificial Sequence
  Description of Artificial Sequence: Synthetic oligonucleotide
gaagcccgggcgcggcgcu

SEQ ID NO: 4464 - RNA, 19 nt, Artificial Sequence
  Description of Artificial Sequence: Synthetic oligonucleotide
ggaagcccgggcgcggcgc

SEQ ID NO: 4465 - RNA, 19 nt, Artificial Sequence
  Description of Artificial Sequence: Synthetic oligonucleotide
gggaagcccgggcgcggcg

SEQ ID NO: 4466 - RNA, 19 nt, Artificial Sequence
  Description of Artificial Sequence: Synthetic oligonucleotide
cgggaagcccgggcgcggc

SEQ ID NO: 4467 - RNA, 19 nt, Artificial Sequence
  Description of Artificial Sequence: Synthetic oligonucleotide
ccgggaagcccgggcgcgg

SEQ ID NO: 4468 - RNA, 19 nt, Artificial Sequence
  Description of Artificial Sequence: Synthetic oligonucleotide
gccgggaagcccgggcgcg

SEQ ID NO: 4469 - RNA, 19 nt, Artificial Sequence
  Description of Artificial Sequence: Synthetic oligonucleotide
ggccgggaagcccgggcgc

SEQ ID NO: 4470 - RNA, 19 nt, Artificial Sequence
  Description of Artificial Sequence: Synthetic oligonucleotide
cggccgggaagcccgggcg

SEQ ID NO: 4471 - RNA, 19 nt, Artificial Sequence
  Description of Artificial Sequence: Synthetic oligonucleotide
acggccgggaagcccgggc

SEQ ID NO: 4472 - RNA, 19 nt, Artificial Sequence
  Description of Artificial Sequence: Synthetic oligonucleotide
cacggccgggaagcccggg

SEQ ID NO: 4473 - RNA, 19 nt, Artificial Sequence
  Description of Artificial Sequence: Synthetic oligonucleotide
gcacggccgggaagcccgg

SEQ ID NO: 4474 - RNA, 19 nt, Artificial Sequence
  Description of Artificial Sequence: Synthetic oligonucleotide
ggcacggccgggaagcccg

SEQ ID NO: 4475 - RNA, 19 nt, Artificial Sequence
  Description of Artificial Sequence: Synthetic oligonucleotide
gggcacggccgggaagccc

SEQ ID NO: 4476 - RNA, 19 nt, Artificial Sequence
  Description of Artificial Sequence: Synthetic oligonucleotide
ggggcacggccgggaagcc

SEQ ID NO: 4477 - RNA, 19 nt, Artificial Sequence
  Description of Artificial Sequence: Synthetic oligonucleotide
cggggcacggccgggaagc

SEQ ID NO: 4478 - RNA, 19 nt, Artificial Sequence
  Description of Artificial Sequence: Synthetic oligonucleotide
gcggggcacggccgggaag

SEQ ID NO: 4479 - RNA, 19 nt, Artificial Sequence
  Description of Artificial Sequence: Synthetic oligonucleotide
cgcggggcacggccgggaa

SEQ ID NO: 4480 - RNA, 19 nt, Artificial Sequence
  Description of Artificial Sequence: Synthetic oligonucleotide
ucgcggggcacggccggga

SEQ ID NO: 4481 - RNA, 19 nt, Artificial Sequence
  Description of Artificial Sequence: Synthetic oligonucleotide
cucgcggggcacggccggg

SEQ ID NO: 4482 - RNA, 19 nt, Artificial Sequence
  Description of Artificial Sequence: Synthetic oligonucleotide
ucucgcggggcacggccgg

SEQ ID NO: 4483 - RNA, 19 nt, Artificial Sequence
  Description of Artificial Sequence: Synthetic oligonucleotide
uucucgcggggcacggccg

SEQ ID NO: 4484 - RNA, 19 nt, Artificial Sequence
  Description of Artificial Sequence: Synthetic oligonucleotide
cuucucgcggggcacggcc

SEQ ID NO: 4485 - RNA, 19 nt, Artificial Sequence
  Description of Artificial Sequence: Synthetic oligonucleotide
gcuucucgcggggcacggc

SEQ ID NO: 4486 - RNA, 19 nt, Artificial Sequence
  Description of Artificial Sequence: Synthetic oligonucleotide
ggcuucucgcggggcacgg

SEQ ID NO: 4487 - RNA, 19 nt, Artificial Sequence
  Description of Artificial Sequence: Synthetic oligonucleotide
uggcuucucgcggggcacg

SEQ ID NO: 4488 - RNA, 19 nt, Artificial Sequence
  Description of Artificial Sequence: Synthetic oligonucleotide
uuggcuucucgcggggcac

SEQ ID NO: 4489 - RNA, 19 nt, Artificial Sequence
  Description of Artificial Sequence: Synthetic oligonucleotide
uuuggcuucucgcggggca

SEQ ID NO: 4490 - RNA, 19 nt, Artificial Sequence
  Description of Artificial Sequence: Synthetic oligonucleotide
cuuuggcuucucgcggggc

SEQ ID NO: 4491 - RNA, 19 nt, Artificial Sequence
  Description of Artificial Sequence: Synthetic oligonucleotide
gcuuuggcuucucgcgggg

SEQ ID NO: 4492 - RNA, 19 nt, Artificial Sequence
  Description of Artificial Sequence: Synthetic oligonucleotide
cgcuuuggcuucucgcggg

SEQ ID NO: 4493 - RNA, 19 nt, Artificial Sequence
  Description of Artificial Sequence: Synthetic oligonucleotide
gcgcuuuggcuucucgcgg

SEQ ID NO: 4494 - RNA, 19 nt, Artificial Sequence
  Description of Artificial Sequence: Synthetic oligonucleotide
ugcgcuuuggcuucucgcg

SEQ ID NO: 4495 - RNA, 19 nt, Artificial Sequence
  Description of Artificial Sequence: Synthetic oligonucleotide
cugcgcuuuggcuucucgc

SEQ ID NO: 4496 - RNA, 19 nt, Artificial Sequence
  Description of Artificial Sequence: Synthetic oligonucleotide
ccugcgcuuuggcuucucg

SEQ ID NO: 4497 - RNA, 19 nt, Artificial Sequence
  Description of Artificial Sequence: Synthetic oligonucleotide
cccugcgcuuuggcuucuc

SEQ ID NO: 4498 - RNA, 19 nt, Artificial Sequence
  Description of Artificial Sequence: Synthetic oligonucleotide
acccugcgcuuuggcuucu

SEQ ID NO: 4499 - RNA, 19 nt, Artificial Sequence
  Description of Artificial Sequence: Synthetic oligonucleotide
gacccugcgcuuuggcuuc

SEQ ID NO: 4500 - RNA, 19 nt, Artificial Sequence
  Description of Artificial Sequence: Synthetic oligonucleotide
ugacccugcgcuuuggcuu

SEQ ID NO: 4501 - RNA, 19 nt, Artificial Sequence
  Description of Artificial Sequence: Synthetic oligonucleotide
cugacccugcgcuuuggcu

SEQ ID NO: 4502 - RNA, 19 nt, Artificial Sequence
  Description of Artificial Sequence: Synthetic oligonucleotide
gcugacccugcgcuuuggc

SEQ ID NO: 4503 - RNA, 19 nt, Artificial Sequence
  Description of Artificial Sequence: Synthetic oligonucleotide
cgcugacccugcgcuuugg

SEQ ID NO: 4504 - RNA, 19 nt, Artificial Sequence
  Description of Artificial Sequence: Synthetic oligonucleotide
ucgcugacccugcgcuuug

SEQ ID NO: 4505 - RNA, 19 nt, Artificial Sequence
  Description of Artificial Sequence: Synthetic oligonucleotide
gucgcugacccugcgcuuu

SEQ ID NO: 4506 - RNA, 19 nt, Artificial Sequence
  Description of Artificial Sequence: Synthetic oligonucleotide
ugucgcugacccugcgcuu

SEQ ID NO: 4507 - RNA, 19 nt, Artificial Sequence
  Description of Artificial Sequence: Synthetic oligonucleotide
cugucgcugacccugcgcu

SEQ ID NO: 4508 - RNA, 19 nt, Artificial Sequence
  Description of Artificial Sequence: Synthetic oligonucleotide
gcugucgcugacccugcgc

SEQ ID NO: 4509 - RNA, 19 nt, Artificial Sequence
  Description of Artificial Sequence: Synthetic oligonucleotide
agcugucgcugacccugcg

SEQ ID NO: 4510 - RNA, 19 nt, Artificial Sequence
  Description of Artificial Sequence: Synthetic oligonucleotide
aagcugucgcugacccugc

SEQ ID NO: 4511 - RNA, 19 nt, Artificial Sequence
  Description of Artificial Sequence: Synthetic oligonucleotide
gaagcugucgcugacccug

SEQ ID NO: 4512 - RNA, 19 nt, Artificial Sequence
  Description of Artificial Sequence: Synthetic oligonucleotide
agaagcugucgcugacccu

SEQ ID NO: 4513 - RNA, 19 nt, Artificial Sequence
  Description of Artificial Sequence: Synthetic oligonucleotide
aagaagcugucgcugaccc

SEQ ID NO: 4514 - RNA, 19 nt, Artificial Sequence
  Description of Artificial Sequence: Synthetic oligonucleotide
gaagaagcugucgcugacc

SEQ ID NO: 4515 - RNA, 19 nt, Artificial Sequence
  Description of Artificial Sequence: Synthetic oligonucleotide
ggaagaagcugucgcugac

SEQ ID NO: 4516 - RNA, 19 nt, Artificial Sequence
  Description of Artificial Sequence: Synthetic oligonucleotide
cggaagaagcugucgcuga

SEQ ID NO: 4517 - RNA, 19 nt, Artificial Sequence
  Description of Artificial Sequence: Synthetic oligonucleotide
ccggaagaagcugucgcug

SEQ ID NO: 4518 - RNA, 19 nt, Artificial Sequence
  Description of Artificial Sequence: Synthetic oligonucleotide
gccggaagaagcugucgcu

SEQ ID NO: 4519 - RNA, 19 nt, Artificial Sequence
  Description of Artificial Sequence: Synthetic oligonucleotide
ggccggaagaagcugucgc

SEQ ID NO: 4520 - RNA, 19 nt, Artificial Sequence
  Description of Artificial Sequence: Synthetic oligonucleotide
gggccggaagaagcugucg

SEQ ID NO: 4521 - RNA, 19 nt, Artificial Sequence
  Description of Artificial Sequence: Synthetic oligonucleotide
ugggccggaagaagcuguc

SEQ ID NO: 4522 - RNA, 19 nt, Artificial Sequence
  Description of Artificial Sequence: Synthetic oligonucleotide
cugggccggaagaagcugu

SEQ ID NO: 4523 - RNA, 19 nt, Artificial Sequence
  Description of Artificial Sequence: Synthetic oligonucleotide
gcugggccggaagaagcug

SEQ ID NO: 4524 - RNA, 19 nt, Artificial Sequence
  Description of Artificial Sequence: Synthetic oligonucleotide
cgcugggccggaagaagcu

SEQ ID NO: 4525 - RNA, 19 nt, Artificial Sequence
  Description of Artificial Sequence: Synthetic oligonucleotide
acgcugggccggaagaagc

SEQ ID NO: 4526 - RNA, 19 nt, Artificial Sequence
  Description of Artificial Sequence: Synthetic oligonucleotide
gacgcugggccggaagaag

SEQ ID NO: 4527 - RNA, 19 nt, Artificial Sequence
  Description of Artificial Sequence: Synthetic oligonucleotide
ugacgcugggccggaagaa

SEQ ID NO: 4528 - RNA, 19 nt, Artificial Sequence
  Description of Artificial Sequence: Synthetic oligonucleotide
augacgcugggccggaaga

SEQ ID NO: 4529 - RNA, 19 nt, Artificial Sequence
  Description of Artificial Sequence: Synthetic oligonucleotide
caugacgcugggccggaag

SEQ ID NO: 4530 - RNA, 19 nt, Artificial Sequence
  Description of Artificial Sequence: Synthetic oligonucleotide
ccaugacgcugggccggaa

SEQ ID NO: 4531 - RNA, 19 nt, Artificial Sequence
  Description of Artificial Sequence: Synthetic oligonucleotide
uccaugacgcugggccgga

SEQ ID NO: 4532 - RNA, 19 nt, Artificial Sequence
  Description of Artificial Sequence: Synthetic oligonucleotide
cuccaugacgcugggccgg

SEQ ID NO: 4533 - RNA, 19 nt, Artificial Sequence
  Description of Artificial Sequence: Synthetic oligonucleotide
gcuccaugacgcugggccg

SEQ ID NO: 4534 - RNA, 19 nt, Artificial Sequence
  Description of Artificial Sequence: Synthetic oligonucleotide
ggcuccaugacgcugggcc

SEQ ID NO: 4535 - RNA, 19 nt, Artificial Sequence
  Description of Artificial Sequence: Synthetic oligonucleotide
gggcuccaugacgcugggc

SEQ ID NO: 4536 - RNA, 19 nt, Artificial Sequence
  Description of Artificial Sequence: Synthetic oligonucleotide
ugggcuccaugacgcuggg

SEQ ID NO: 4537 - RNA, 19 nt, Artificial Sequence
  Description of Artificial Sequence: Synthetic oligonucleotide
augggcuccaugacgcugg

SEQ ID NO: 4538 - RNA, 19 nt, Artificial Sequence
  Description of Artificial Sequence: Synthetic oligonucleotide
gaugggcuccaugacgcug

SEQ ID NO: 4539 - RNA, 19 nt, Artificial Sequence
  Description of Artificial Sequence: Synthetic oligonucleotide
ggaugggcuccaugacgcu

SEQ ID NO: 4540 - RNA, 19 nt, Artificial Sequence
  Description of Artificial Sequence: Synthetic oligonucleotide
aggaugggcuccaugacgc

SEQ ID NO: 4541 - RNA, 19 nt, Artificial Sequence
  Description of Artificial Sequence: Synthetic oligonucleotide
caggaugggcuccaugacg

SEQ ID NO: 4542 - RNA, 19 nt, Artificial Sequence
  Description of Artificial Sequence: Synthetic oligonucleotide
ccaggaugggcuccaugac

SEQ ID NO: 4543 - RNA, 19 nt, Artificial Sequence
  Description of Artificial Sequence: Synthetic oligonucleotide
cccaggaugggcuccauga

SEQ ID NO: 4544 - RNA, 19 nt, Artificial Sequence
  Description of Artificial Sequence: Synthetic oligonucleotide
gcccaggaugggcuccaug

SEQ ID NO: 4545 - RNA, 19 nt, Artificial Sequence
  Description of Artificial Sequence: Synthetic oligonucleotide
ggcccaggaugggcuccau

SEQ ID NO: 4546 - RNA, 19 nt, Artificial Sequence
  Description of Artificial Sequence: Synthetic oligonucleotide
cggcccaggaugggcucca

SEQ ID NO: 4547 - RNA, 19 nt, Artificial Sequence
  Description of Artificial Sequence: Synthetic oligonucleotide
gcggcccaggaugggcucc

SEQ ID NO: 4548 - RNA, 19 nt, Artificial Sequence
  Description of Artificial Sequence: Synthetic oligonucleotide
ugcggcccaggaugggcuc

SEQ ID NO: 4549 - RNA, 19 nt, Artificial Sequence
  Description of Artificial Sequence: Synthetic oligonucleotide
gugcggcccaggaugggcu

SEQ ID NO: 4550 - RNA, 19 nt, Artificial Sequence
  Description of Artificial Sequence: Synthetic oligonucleotide
cgugcggcccaggaugggc

SEQ ID NO: 4551 - RNA, 19 nt, Artificial Sequence
  Description of Artificial Sequence: Synthetic oligonucleotide
gcgugcggcccaggauggg

SEQ ID NO: 4552 - RNA, 19 nt, Artificial Sequence
  Description of Artificial Sequence: Synthetic oligonucleotide
ugcgugcggcccaggaugg

SEQ ID NO: 4553 - RNA, 19 nt, Artificial Sequence
  Description of Artificial Sequence: Synthetic oligonucleotide
augcgugcggcccaggaug

SEQ ID NO: 4554 - RNA, 19 nt, Artificial Sequence
  Description of Artificial Sequence: Synthetic oligonucleotide
aaugcgugcggcccaggau

SEQ ID NO: 4555 - RNA, 19 nt, Artificial Sequence
  Description of Artificial Sequence: Synthetic oligonucleotide
uaaugcgugcggcccagga

SEQ ID NO: 4556 - RNA, 19 nt, Artificial Sequence
  Description of Artificial Sequence: Synthetic oligonucleotide
guaaugcgugcggcccagg

SEQ ID NO: 4557 - RNA, 19 nt, Artificial Sequence
  Description of Artificial Sequence: Synthetic oligonucleotide
uguaaugcgugcggcccag

SEQ ID NO: 4558 - RNA, 19 nt, Artificial Sequence
  Description of Artificial Sequence: Synthetic oligonucleotide
cuguaaugcgugcggccca

SEQ ID NO: 4559 - RNA, 19 nt, Artificial Sequence
  Description of Artificial Sequence: Synthetic oligonucleotide
gcuguaaugcgugcggccc

SEQ ID NO: 4560 - RNA, 19 nt, Artificial Sequence
  Description of Artificial Sequence: Synthetic oligonucleotide
ggcuguaaugcgugcggcc

SEQ ID NO: 4561 - RNA, 19 nt, Artificial Sequence
  Description of Artificial Sequence: Synthetic oligonucleotide
uggcuguaaugcgugcggc

SEQ ID NO: 4562 - RNA, 19 nt, Artificial Sequence
  Description of Artificial Sequence: Synthetic oligonucleotide
cuggcuguaaugcgugcgg

SEQ ID NO: 4563 - RNA, 19 nt, Artificial Sequence
  Description of Artificial Sequence: Synthetic oligonucleotide
gcuggcuguaaugcgugcg

SEQ ID NO: 4564 - RNA, 19 nt, Artificial Sequence
  Description of Artificial Sequence: Synthetic oligonucleotide
agcuggcuguaaugcgugc

SEQ ID NO: 4565 - RNA, 19 nt, Artificial Sequence
  Description of Artificial Sequence: Synthetic oligonucleotide
cagcuggcuguaaugcgug

SEQ ID NO: 4566 - RNA, 19 nt, Artificial Sequence
  Description of Artificial Sequence: Synthetic oligonucleotide
gcagcuggcuguaaugcgu

SEQ ID NO: 4567 - RNA, 19 nt, Artificial Sequence
  Description of Artificial Sequence: Synthetic oligonucleotide
cgcagcuggcuguaaugcg

SEQ ID NO: 4568 - RNA, 19 nt, Artificial Sequence
  Description of Artificial Sequence: Synthetic oligonucleotide
gcgcagcuggcuguaaugc

SEQ ID NO: 4569 - RNA, 19 nt, Artificial Sequence
  Description of Artificial Sequence: Synthetic oligonucleotide
ugcgcagcuggcuguaaug

SEQ ID NO: 4570 - RNA, 19 nt, Artificial Sequence
  Description of Artificial Sequence: Synthetic oligonucleotide
uugcgcagcuggcuguaau

SEQ ID NO: 4571 - RNA, 19 nt, Artificial Sequence
  Description of Artificial Sequence: Synthetic oligonucleotide
cuugcgcagcuggcuguaa

SEQ ID NO: 4572 - RNA, 19 nt, Artificial Sequence
  Description of Artificial Sequence: Synthetic oligonucleotide
ucuugcgcagcuggcugua

SEQ ID NO: 4573 - RNA, 19 nt, Artificial Sequence
  Description of Artificial Sequence: Synthetic oligonucleotide
uucuugcgcagcuggcugu

SEQ ID NO: 4574 - RNA, 19 nt, Artificial Sequence
  Description of Artificial Sequence: Synthetic oligonucleotide
cuucuugcgcagcuggcug

SEQ ID NO: 4575 - RNA, 19 nt, Artificial Sequence
  Description of Artificial Sequence: Synthetic oligonucleotide
ucuucuugcgcagcuggcu

SEQ ID NO: 4576 - RNA, 19 nt, Artificial Sequence
  Description of Artificial Sequence: Synthetic oligonucleotide
cucuucuugcgcagcuggc

SEQ ID NO: 4577 - RNA, 19 nt, Artificial Sequence
  Description of Artificial Sequence: Synthetic oligonucleotide
gcucuucuugcgcagcugg

SEQ ID NO: 4578 - RNA, 19 nt, Artificial Sequence
  Description of Artificial Sequence: Synthetic oligonucleotide
agcucuucuugcgcagcug

SEQ ID NO: 4579 - RNA, 19 nt, Artificial Sequence
  Description of Artificial Sequence: Synthetic oligonucleotide
cagcucuucuugcgcagcu

SEQ ID NO: 4580 - RNA, 19 nt, Artificial Sequence
  Description of Artificial Sequence: Synthetic oligonucleotide
ucagcucuucuugcgcagc

SEQ ID NO: 4581 - RNA, 19 nt, Artificial Sequence
  Description of Artificial Sequence: Synthetic oligonucleotide
cucagcucuucuugcgcag

SEQ ID NO: 4582 - RNA, 19 nt, Artificial Sequence
  Description of Artificial Sequence: Synthetic oligonucleotide
acucagcucuucuugcgca

SEQ ID NO: 4583 - RNA, 19 nt, Artificial Sequence
  Description of Artificial Sequence: Synthetic oligonucleotide
gacucagcucuucuugcgc

SEQ ID NO: 4584 - RNA, 19 nt, Artificial Sequence
  Description of Artificial Sequence: Synthetic oligonucleotide
cgacucagcucuucuugcg

SEQ ID NO: 4585 - RNA, 19 nt, Artificial Sequence
  Description of Artificial Sequence: Synthetic oligonucleotide
gcgacucagcucuucuugc

SEQ ID NO: 4586 - RNA, 19 nt, Artificial Sequence
  Description of Artificial Sequence: Synthetic oligonucleotide
ggcgacucagcucuucuug

SEQ ID NO: 4587 - RNA, 19 nt, Artificial Sequence
  Description of Artificial Sequence: Synthetic oligonucleotide
cggcgacucagcucuucuu

SEQ ID NO: 4588 - RNA, 19 nt, Artificial Sequence
  Description of Artificial Sequence: Synthetic oligonucleotide
gcggcgacucagcucuucu

SEQ ID NO: 4589 - RNA, 19 nt, Artificial Sequence
  Description of Artificial Sequence: Synthetic oligonucleotide
ugcggcgacucagcucuuc

SEQ ID NO: 4590 - RNA, 19 nt, Artificial Sequence
  Description of Artificial Sequence: Synthetic oligonucleotide
gugcggcgacucagcucuu

SEQ ID NO: 4591 - RNA, 19 nt, Artificial Sequence
  Description of Artificial Sequence: Synthetic oligonucleotide
ggugcggcgacucagcucu

SEQ ID NO: 4592 - RNA, 19 nt, Artificial Sequence
  Description of Artificial Sequence: Synthetic oligonucleotide
uggugcggcgacucagcuc

SEQ ID NO: 4593 - RNA, 19 nt, Artificial Sequence
  Description of Artificial Sequence: Synthetic oligonucleotide
cuggugcggcgacucagcu

SEQ ID NO: 4594 - RNA, 19 nt, Artificial Sequence
  Description of Artificial Sequence: Synthetic oligonucleotide
gcuggugcggcgacucagc

SEQ ID NO: 4595 - RNA, 19 nt, Artificial Sequence
  Description of Artificial Sequence: Synthetic oligonucleotide
ggcuggugcggcgacucag

SEQ ID NO: 4596 - RNA, 19 nt, Artificial Sequence
  Description of Artificial Sequence: Synthetic oligonucleotide
cggcuggugcggcgacuca

SEQ ID NO: 4597 - RNA, 19 nt, Artificial Sequence
  Description of Artificial Sequence: Synthetic oligonucleotide
gcggcuggugcggcgacuc

SEQ ID NO: 4598 - RNA, 19 nt, Artificial Sequence
  Description of Artificial Sequence: Synthetic oligonucleotide
ggcggcuggugcggcgacu

SEQ ID NO: 4599 - RNA, 19 nt, Artificial Sequence
  Description of Artificial Sequence: Synthetic oligonucleotide
cggcggcuggugcggcgac

SEQ ID NO: 4600 - RNA, 19 nt, Artificial Sequence
  Description of Artificial Sequence: Synthetic oligonucleotide
gcggcggcuggugcggcga

SEQ ID NO: 4601 - RNA, 19 nt, Artificial Sequence
  Description of Artificial Sequence: Synthetic oligonucleotide
cgcggcggcuggugcggcg

SEQ ID NO: 4602 - RNA, 19 nt, Artificial Sequence
  Description of Artificial Sequence: Synthetic oligonucleotide
gcgcggcggcuggugcggc

SEQ ID NO: 4603 - RNA, 19 nt, Artificial Sequence
  Description of Artificial Sequence: Synthetic oligonucleotide
ggcgcggcggcuggugcgg

SEQ ID NO: 4604 - RNA, 19 nt, Artificial Sequence
  Description of Artificial Sequence: Synthetic oligonucleotide
gggcgcggcggcuggugcg

SEQ ID NO: 4605 - RNA, 19 nt, Artificial Sequence
  Description of Artificial Sequence: Synthetic oligonucleotide
ggggcgcggcggcuggugc

SEQ ID NO: 4606 - RNA, 19 nt, Artificial Sequence
  Description of Artificial Sequence: Synthetic oligonucleotide
cggggcgcggcggcuggug

SEQ ID NO: 4607 - RNA, 19 nt, Artificial Sequence
  Description of Artificial Sequence: Synthetic oligonucleotide
ccggggcgcggcggcuggu

SEQ ID NO: 4608 - RNA, 19 nt, Artificial Sequence
  Description of Artificial Sequence: Synthetic oligonucleotide
cccggggcgcggcggcugg

SEQ ID NO: 4609 - RNA, 19 nt, Artificial Sequence
  Description of Artificial Sequence: Synthetic oligonucleotide
gcccggggcgcggcggcug

SEQ ID NO: 4610 - RNA, 19 nt, Artificial Sequence
  Description of Artificial Sequence: Synthetic oligonucleotide
ggcccggggcgcggcggcu

SEQ ID NO: 4611 - RNA, 19 nt, Artificial Sequence
  Description of Artificial Sequence: Synthetic oligonucleotide
cggcccggggcgcggcggc

SEQ ID NO: 4612 - RNA, 19 nt, Artificial Sequence
  Description of Artificial Sequence: Synthetic oligonucleotide
ccggcccggggcgcggcgg

SEQ ID NO: 4613 - RNA, 19 nt, Artificial Sequence
  Description of Artificial Sequence: Synthetic oligonucleotide
gccggcccggggcgcggcg

SEQ ID NO: 4614 - RNA, 19 nt, Artificial Sequence
  Description of Artificial Sequence: Synthetic oligonucleotide
cgccggcccggggcgcggc

SEQ ID NO: 4615 - RNA, 19 nt, Artificial Sequence
  Description of Artificial Sequence: Synthetic oligonucleotide
ccgccggcccggggcgcgg

SEQ ID NO: 4616 - RNA, 19 nt, Artificial Sequence
  Description of Artificial Sequence: Synthetic oligonucleotide
cccgccggcccggggcgcg

SEQ ID NO: 4617 - RNA, 19 nt, Artificial Sequence
  Description of Artificial Sequence: Synthetic oligonucleotide
acccgccggcccggggcgc

SEQ ID NO: 4618 - RNA, 19 nt, Artificial Sequence
  Description of Artificial Sequence: Synthetic oligonucleotide
aacccgccggcccggggcg

SEQ ID NO: 4619 - RNA, 19 nt, Artificial Sequence
  Description of Artificial Sequence: Synthetic oligonucleotide
aaacccgccggcccggggc

SEQ ID NO: 4620 - RNA, 19 nt, Artificial Sequence
  Description of Artificial Sequence: Synthetic oligonucleotide
gaaacccgccggcccgggg

SEQ ID NO: 4621 - RNA, 19 nt, Artificial Sequence
  Description of Artificial Sequence: Synthetic oligonucleotide
agaaacccgccggcccggg

SEQ ID NO: 4622 - RNA, 19 nt, Artificial Sequence
  Description of Artificial Sequence: Synthetic oligonucleotide
gagaaacccgccggcccgg

SEQ ID NO: 4623 - RNA, 19 nt, Artificial Sequence
  Description of Artificial Sequence: Synthetic oligonucleotide
agagaaacccgccggcccg

SEQ ID NO: 4624 - RNA, 19 nt, Artificial Sequence
  Description of Artificial Sequence: Synthetic oligonucleotide
uagagaaacccgccggccc

SEQ ID NO: 4625 - RNA, 19 nt, Artificial Sequence
  Description of Artificial Sequence: Synthetic oligonucleotide
uuagagaaacccgccggcc

SEQ ID NO: 4626 - RNA, 19 nt, Artificial Sequence
  Description of Artificial Sequence: Synthetic oligonucleotide
guuagagaaacccgccggc

SEQ ID NO: 4627 - RNA, 19 nt, Artificial Sequence
  Description of Artificial Sequence: Synthetic oligonucleotide
uguuagagaaacccgccgg

SEQ ID NO: 4628 - RNA, 19 nt, Artificial Sequence
  Description of Artificial Sequence: Synthetic oligonucleotide
uuguuagagaaacccgccg

SEQ ID NO: 4629 - RNA, 19 nt, Artificial Sequence
  Description of Artificial Sequence: Synthetic oligonucleotide
uuuguuagagaaacccgcc

SEQ ID NO: 4630 - RNA, 19 nt, Artificial Sequence
  Description of Artificial Sequence: Synthetic oligonucleotide
auuuguuagagaaacccgc

SEQ ID NO: 4631 - RNA, 19 nt, Artificial Sequence
  Description of Artificial Sequence: Synthetic oligonucleotide
uauuuguuagagaaacccg

SEQ ID NO: 4632 - RNA, 19 nt, Artificial Sequence
  Description of Artificial Sequence: Synthetic oligonucleotide
uuauuuguuagagaaaccc

SEQ ID NO: 4633 - RNA, 19 nt, Artificial Sequence
  Description of Artificial Sequence: Synthetic oligonucleotide
uuuauuuguuagagaaacc

SEQ ID NO: 4634 - RNA, 19 nt, Artificial Sequence
  Description of Artificial Sequence: Synthetic oligonucleotide
guuuauuuguuagagaaac

SEQ ID NO: 4635 - RNA, 19 nt, Artificial Sequence
  Description of Artificial Sequence: Synthetic oligonucleotide
uguuuauuuguuagagaaa

SEQ ID NO: 4636 - RNA, 19 nt, Artificial Sequence
  Description of Artificial Sequence: Synthetic oligonucleotide
cuguuuauuuguuagagaa

SEQ ID NO: 4637 - RNA, 19 nt, Artificial Sequence
  Description of Artificial Sequence: Synthetic oligonucleotide
ucuguuuauuuguuagaga

SEQ ID NO: 4638 - RNA, 19 nt, Artificial Sequence
  Description of Artificial Sequence: Synthetic oligonucleotide
uucuguuuauuuguuagag

SEQ ID NO: 4639 - RNA, 19 nt, Artificial Sequence
  Description of Artificial Sequence: Synthetic oligonucleotide
guucuguuuauuuguuaga

SEQ ID NO: 4640 - RNA, 19 nt, Artificial Sequence
  Description of Artificial Sequence: Synthetic oligonucleotide
gguucuguuuauuuguuag

SEQ ID NO: 4641 - RNA, 19 nt, Artificial Sequence
  Description of Artificial Sequence: Synthetic oligonucleotide
ggguucuguuuauuuguua

SEQ ID NO: 4642 - RNA, 19 nt, Artificial Sequence
  Description of Artificial Sequence: Synthetic oligonucleotide
cggguucuguuuauuuguu

SEQ ID NO: 4643 - RNA, 19 nt, Artificial Sequence
  Description of Artificial Sequence: Synthetic oligonucleotide
gcggguucuguuuauuugu

SEQ ID NO: 4644 - RNA, 19 nt, Artificial Sequence
  Description of Artificial Sequence: Synthetic oligonucleotide
ugcggguucuguuuauuug

SEQ ID NO: 4645 - RNA, 19 nt, Artificial Sequence
  Description of Artificial Sequence: Synthetic oligonucleotide
gugcggguucuguuuauuu

SEQ ID NO: 4646 - RNA, 19 nt, Artificial Sequence
  Description of Artificial Sequence: Synthetic oligonucleotide
agugcggguucuguuuauu

SEQ ID NO: 4647 - RNA, 19 nt, Artificial Sequence
  Description of Artificial Sequence: Synthetic oligonucleotide
cagugcggguucuguuuau

SEQ ID NO: 4648 - RNA, 19 nt, Artificial Sequence
  Description of Artificial Sequence: Synthetic oligonucleotide
gcagugcggguucuguuua

SEQ ID NO: 4649 - RNA, 19 nt, Artificial Sequence
  Description of Artificial Sequence: Synthetic oligonucleotide
ggcagugcggguucuguuu

SEQ ID NO: 4650 - RNA, 19 nt, Artificial Sequence
  Description of Artificial Sequence: Synthetic oligonucleotide
gggcagugcggguucuguu

SEQ ID NO: 4651 - RNA, 19 nt, Artificial Sequence
  Description of Artificial Sequence: Synthetic oligonucleotide
ugggcagugcggguucugu

SEQ ID NO: 4652 - RNA, 19 nt, Artificial Sequence
  Description of Artificial Sequence: Synthetic oligonucleotide
cugggcagugcggguucug

SEQ ID NO: 4653 - RNA, 19 nt, Artificial Sequence
  Description of Artificial Sequence: Synthetic oligonucleotide
ccugggcagugcggguucu

SEQ ID NO: 4654 - RNA, 19 nt, Artificial Sequence
  Description of Artificial Sequence: Synthetic oligonucleotide
gccugggcagugcggguuc

SEQ ID NO: 4655 - RNA, 19 nt, Artificial Sequence
  Description of Artificial Sequence: Synthetic oligonucleotide
cgccugggcagugcggguu

SEQ ID NO: 4656 - RNA, 19 nt, Artificial Sequence
  Description of Artificial Sequence: Synthetic oligonucleotide
ucgccugggcagugcgggu

SEQ ID NO: 4657 - RNA, 19 nt, Artificial Sequence
  Description of Artificial Sequence: Synthetic oligonucleotide
cucgccugggcagugcggg

SEQ ID NO: 4658 - RNA, 19 nt, Artificial Sequence
  Description of Artificial Sequence: Synthetic oligonucleotide
gcucgccugggcagugcgg

SEQ ID NO: 4659 - RNA, 19 nt, Artificial Sequence
  Description of Artificial Sequence: Synthetic oligonucleotide
cgcucgccugggcagugcg

SEQ ID NO: 4660 - RNA, 19 nt, Artificial Sequence
  Description of Artificial Sequence: Synthetic oligonucleotide
acgcucgccugggcagugc

SEQ ID NO: 4661 - RNA, 19 nt, Artificial Sequence
  Description of Artificial Sequence: Synthetic oligonucleotide
aacgcucgccugggcagug

SEQ ID NO: 4662 - RNA, 19 nt, Artificial Sequence
  Description of Artificial Sequence: Synthetic oligonucleotide
caacgcucgccugggcagu

SEQ ID NO: 4663 - RNA, 19 nt, Artificial Sequence
  Description of Artificial Sequence: Synthetic oligonucleotide
gcaacgcucgccugggcag

SEQ ID NO: 4664 - RNA, 19 nt, Artificial Sequence
  Description of Artificial Sequence: Synthetic oligonucleotide
ggcaacgcucgccugggca

SEQ ID NO: 4665 - RNA, 19 nt, Artificial Sequence
  Description of Artificial Sequence: Synthetic oligonucleotide
uggcaacgcucgccugggc

SEQ ID NO: 4666 - RNA, 19 nt, Artificial Sequence
  Description of Artificial Sequence: Synthetic oligonucleotide
guggcaacgcucgccuggg

SEQ ID NO: 4667 - RNA, 19 nt, Artificial Sequence
  Description of Artificial Sequence: Synthetic oligonucleotide
aguggcaacgcucgccugg

SEQ ID NO: 4668 - RNA, 19 nt, Artificial Sequence
  Description of Artificial Sequence: Synthetic oligonucleotide
aaguggcaacgcucgccug

SEQ ID NO: 4669 - RNA, 19 nt, Artificial Sequence
  Description of Artificial Sequence: Synthetic oligonucleotide
aaaguggcaacgcucgccu

SEQ ID NO: 4670 - RNA, 19 nt, Artificial Sequence
  Description of Artificial Sequence: Synthetic oligonucleotide
gaaaguggcaacgcucgcc

SEQ ID NO: 4671 - RNA, 19 nt, Artificial Sequence
  Description of Artificial Sequence: Synthetic oligonucleotide
ugaaaguggcaacgcucgc

SEQ ID NO: 4672 - RNA, 19 nt, Artificial Sequence
  Description of Artificial Sequence: Synthetic oligonucleotide
uugaaaguggcaacgcucg

SEQ ID NO: 4673 - RNA, 19 nt, Artificial Sequence
  Description of Artificial Sequence: Synthetic oligonucleotide
uuugaaaguggcaacgcuc

SEQ ID NO: 4674 - RNA, 19 nt, Artificial Sequence
  Description of Artificial Sequence: Synthetic oligonucleotide
cuuugaaaguggcaacgcu

SEQ ID NO: 4675 - RNA, 19 nt, Artificial Sequence
  Description of Artificial Sequence: Synthetic oligonucleotide
acuuugaaaguggcaacgc

SEQ ID NO: 4676 - RNA, 19 nt, Artificial Sequence
  Description of Artificial Sequence: Synthetic oligonucleotide
cacuuugaaaguggcaacg

SEQ ID NO: 4677 - RNA, 19 nt, Artificial Sequence
  Description of Artificial Sequence: Synthetic oligonucleotide
ccacuuugaaaguggcaac

SEQ ID NO: 4678 - RNA, 19 nt, Artificial Sequence
  Description of Artificial Sequence: Synthetic oligonucleotide
accacuuugaaaguggcaa

SEQ ID NO: 4679 - RNA, 19 nt, Artificial Sequence
  Description of Artificial Sequence: Synthetic oligonucleotide
gaccacuuugaaaguggca

SEQ ID NO: 4680 - RNA, 19 nt, Artificial Sequence
  Description of Artificial Sequence: Synthetic oligonucleotide
ggaccacuuugaaaguggc

SEQ ID NO: 4681 - RNA, 19 nt, Artificial Sequence
  Description of Artificial Sequence: Synthetic oligonucleotide
gggaccacuuugaaagugg

SEQ ID NO: 4682 - RNA, 19 nt, Artificial Sequence
  Description of Artificial Sequence: Synthetic oligonucleotide
ggggaccacuuugaaagug

SEQ ID NO: 4683 - RNA, 19 nt, Artificial Sequence
  Description of Artificial Sequence: Synthetic oligonucleotide
aggggaccacuuugaaagu

SEQ ID NO: 4684 - RNA, 19 nt, Artificial Sequence
  Description of Artificial Sequence: Synthetic oligonucleotide
caggggaccacuuugaaag

SEQ ID NO: 4685 - RNA, 19 nt, Artificial Sequence
  Description of Artificial Sequence: Synthetic oligonucleotide
ccaggggaccacuuugaaa

SEQ ID NO: 4686 - RNA, 19 nt, Artificial Sequence
  Description of Artificial Sequence: Synthetic oligonucleotide
cccaggggaccacuuugaa

SEQ ID NO: 4687 - RNA, 19 nt, Artificial Sequence
  Description of Artificial Sequence: Synthetic oligonucleotide
ccccaggggaccacuuuga

SEQ ID NO: 4688 - RNA, 19 nt, Artificial Sequence
  Description of Artificial Sequence: Synthetic oligonucleotide
uccccaggggaccacuuug

SEQ ID NO: 4689 - RNA, 19 nt, Artificial Sequence
  Description of Artificial Sequence: Synthetic oligonucleotide
cuccccaggggaccacuuu

SEQ ID NO: 4690 - RNA, 19 nt, Artificial Sequence
  Description of Artificial Sequence: Synthetic oligonucleotide
gcuccccaggggaccacuu

SEQ ID NO: 4691 - RNA, 19 nt, Artificial Sequence
  Description of Artificial Sequence: Synthetic oligonucleotide
agcuccccaggggaccacu

SEQ ID NO: 4692 - RNA, 19 nt, Artificial Sequence
  Description of Artificial Sequence: Synthetic oligonucleotide
gagcuccccaggggaccac

SEQ ID NO: 4693 - RNA, 19 nt, Artificial Sequence
  Description of Artificial Sequence: Synthetic oligonucleotide
ugagcuccccaggggacca

SEQ ID NO: 4694 - RNA, 19 nt, Artificial Sequence
  Description of Artificial Sequence: Synthetic oligonucleotide
cugagcuccccaggggacc

SEQ ID NO: 4695 - RNA, 19 nt, Artificial Sequence
  Description of Artificial Sequence: Synthetic oligonucleotide
gcugagcuccccaggggac

SEQ ID NO: 4696 - RNA, 19 nt, Artificial Sequence
  Description of Artificial Sequence: Synthetic oligonucleotide
ggcugagcuccccagggga

SEQ ID NO: 4697 - RNA, 19 nt, Artificial Sequence
  Description of Artificial Sequence: Synthetic oligonucleotide
aggcugagcuccccagggg

SEQ ID NO: 4698 - RNA, 19 nt, Artificial Sequence
  Description of Artificial Sequence: Synthetic oligonucleotide
gaggcugagcuccccaggg

SEQ ID NO: 4699 - RNA, 19 nt, Artificial Sequence
  Description of Artificial Sequence: Synthetic oligonucleotide
ugaggcugagcuccccagg

SEQ ID NO: 4700 - RNA, 19 nt, Artificial Sequence
  Description of Artificial Sequence: Synthetic oligonucleotide
augaggcugagcuccccag

SEQ ID NO: 4701 - RNA, 19 nt, Artificial Sequence
  Description of Artificial Sequence: Synthetic oligonucleotide
gaugaggcugagcucccca

SEQ ID NO: 4702 - RNA, 19 nt, Artificial Sequence
  Description of Artificial Sequence: Synthetic oligonucleotide
ggaugaggcugagcucccc

SEQ ID NO: 4703 - RNA, 19 nt, Artificial Sequence
  Description of Artificial Sequence: Synthetic oligonucleotide
aggaugaggcugagcuccc

SEQ ID NO: 4704 - RNA, 19 nt, Artificial Sequence
  Description of Artificial Sequence: Synthetic oligonucleotide
caggaugaggcugagcucc

SEQ ID NO: 4705 - RNA, 19 nt, Artificial Sequence
  Description of Artificial Sequence: Synthetic oligonucleotide
ucaggaugaggcugagcuc

SEQ ID NO: 4706 - RNA, 19 nt, Artificial Sequence
  Description of Artificial Sequence: Synthetic oligonucleotide
aucaggaugaggcugagcu

SEQ ID NO: 4707 - RNA, 19 nt, Artificial Sequence
  Description of Artificial Sequence: Synthetic oligonucleotide
caucaggaugaggcugagc

SEQ ID NO: 4708 - RNA, 19 nt, Artificial Sequence
  Description of Artificial Sequence: Synthetic oligonucleotide
ucaucaggaugaggcugag

SEQ ID NO: 4709 - RNA, 19 nt, Artificial Sequence
  Description of Artificial Sequence: Synthetic oligonucleotide
aucaucaggaugaggcuga

SEQ ID NO: 4710 - RNA, 19 nt, Artificial Sequence
  Description of Artificial Sequence: Synthetic oligonucleotide
caucaucaggaugaggcug

SEQ ID NO: 4711 - RNA, 19 nt, Artificial Sequence
  Description of Artificial Sequence: Synthetic oligonucleotide
gcaucaucaggaugaggcu

SEQ ID NO: 4712 - RNA, 19 nt, Artificial Sequence
  Description of Artificial Sequence: Synthetic oligonucleotide
agcaucaucaggaugaggc

SEQ ID NO: 4713 - RNA, 19 nt, Artificial Sequence
  Description of Artificial Sequence: Synthetic oligonucleotide
cagcaucaucaggaugagg

SEQ ID NO: 4714 - RNA, 19 nt, Artificial Sequence
  Description of Artificial Sequence: Synthetic oligonucleotide
gcagcaucaucaggaugag

SEQ ID NO: 4715 - RNA, 19 nt, Artificial Sequence
  Description of Artificial Sequence: Synthetic oligonucleotide
ggcagcaucaucaggauga

SEQ ID NO: 4716 - RNA, 19 nt, Artificial Sequence
  Description of Artificial Sequence: Synthetic oligonucleotide
uggcagcaucaucaggaug

SEQ ID NO: 4717 - RNA, 19 nt, Artificial Sequence
  Description of Artificial Sequence: Synthetic oligonucleotide
uuggcagcaucaucaggau

SEQ ID NO: 4718 - RNA, 19 nt, Artificial Sequence
  Description of Artificial Sequence: Synthetic oligonucleotide
cuuggcagcaucaucagga

SEQ ID NO: 4719 - RNA, 19 nt, Artificial Sequence
  Description of Artificial Sequence: Synthetic oligonucleotide
ccuuggcagcaucaucagg

SEQ ID NO: 4720 - RNA, 19 nt, Artificial Sequence
  Description of Artificial Sequence: Synthetic oligonucleotide
gccuuggcagcaucaucag

SEQ ID NO: 4721 - RNA, 19 nt, Artificial Sequence
  Description of Artificial Sequence: Synthetic oligonucleotide
cgccuuggcagcaucauca

SEQ ID NO: 4722 - RNA, 19 nt, Artificial Sequence
  Description of Artificial Sequence: Synthetic oligonucleotide
gcgccuuggcagcaucauc

SEQ ID NO: 4723 - RNA, 19 nt, Artificial Sequence
  Description of Artificial Sequence: Synthetic oligonucleotide
ugcgccuuggcagcaucau

SEQ ID NO: 4724 - RNA, 19 nt, Artificial Sequence
  Description of Artificial Sequence: Synthetic oligonucleotide
gugcgccuuggcagcauca

SEQ ID NO: 4725 - RNA, 19 nt, Artificial Sequence
  Description of Artificial Sequence: Synthetic oligonucleotide
agugcgccuuggcagcauc

SEQ ID NO: 4726 - RNA, 19 nt, Artificial Sequence
  Description of Artificial Sequence: Synthetic oligonucleotide
aagugcgccuuggcagcau

SEQ ID NO: 4727 - RNA, 19 nt, Artificial Sequence
  Description of Artificial Sequence: Synthetic oligonucleotide
aaagugcgccuuggcagca

SEQ ID NO: 4728 - RNA, 19 nt, Artificial Sequence
  Description of Artificial Sequence: Synthetic oligonucleotide
aaaagugcgccuuggcagc

SEQ ID NO: 4729 - RNA, 19 nt, Artificial Sequence
  Description of Artificial Sequence: Synthetic oligonucleotide
aaaaagugcgccuuggcag

SEQ ID NO: 4730 - RNA, 19 nt, Artificial Sequence
  Description of Artificial Sequence: Synthetic oligonucleotide
uaaaaagugcgccuuggca

SEQ ID NO: 4731 - RNA, 19 nt, Artificial Sequence
  Description of Artificial Sequence: Synthetic oligonucleotide
auaaaaagugcgccuuggc

SEQ ID NO: 4732 - RNA, 19 nt, Artificial Sequence
  Description of Artificial Sequence: Synthetic oligonucleotide
aauaaaaagugcgccuugg

SEQ ID NO: 4733 - RNA, 19 nt, Artificial Sequence
  Description of Artificial Sequence: Synthetic oligonucleotide
aaauaaaaagugcgccuug

SEQ ID NO: 4734 - RNA, 19 nt, Artificial Sequence
  Description of Artificial Sequence: Synthetic oligonucleotide
aaaauaaaaagugcgccuu

SEQ ID NO: 4735 - RNA, 19 nt, Artificial Sequence
  Description of Artificial Sequence: Synthetic oligonucleotide
aaaaauaaaaagugcgccu

SEQ ID NO: 4736 - RNA, 19 nt, Artificial Sequence
  Description of Artificial Sequence: Synthetic oligonucleotide
uaaaaauaaaaagugcgcc

SEQ ID NO: 4737 - RNA, 19 nt, Artificial Sequence
  Description of Artificial Sequence: Synthetic oligonucleotide
auaaaaauaaaaagugcgc

SEQ ID NO: 4738 - RNA, 19 nt, Artificial Sequence
  Description of Artificial Sequence: Synthetic oligonucleotide
aauaaaaauaaaaagugcg

SEQ ID NO: 4739 - RNA, 19 nt, Artificial Sequence
  Description of Artificial Sequence: Synthetic oligonucleotide
aaauaaaaauaaaaagugc

SEQ ID NO: 4740 - RNA, 19 nt, Artificial Sequence
  Description of Artificial Sequence: Synthetic oligonucleotide
aaaauaaaaauaaaaagug

SEQ ID NO: 4741 - RNA, 19 nt, Artificial Sequence
  Description of Artificial Sequence: Synthetic oligonucleotide
uaaaauaaaaauaaaaagu

SEQ ID NO: 4742 - RNA, 19 nt, Artificial Sequence
  Description of Artificial Sequence: Synthetic oligonucleotide
auaaaauaaaaauaaaaag

SEQ ID NO: 4743 - RNA, 19 nt, Artificial Sequence
  Description of Artificial Sequence: Synthetic oligonucleotide
aauaaaauaaaaauaaaaa

SEQ ID NO: 4744 - RNA, 19 nt, Artificial Sequence
  Description of Artificial Sequence: Synthetic oligonucleotide
aaauaaaauaaaaauaaaa

SEQ ID NO: 4745 - RNA, 19 nt, Artificial Sequence
  Description of Artificial Sequence: Synthetic oligonucleotide
aaaauaaaauaaaaauaaa

SEQ ID NO: 4746 - RNA, 19 nt, Artificial Sequence
  Description of Artificial Sequence: Synthetic oligonucleotide
aaaaauaaaauaaaaauaa

SEQ ID NO: 4747 - RNA, 19 nt, Artificial Sequence
  Description of Artificial Sequence: Synthetic oligonucleotide
uaaaaauaaaauaaaaaua

SEQ ID NO: 4748 - RNA, 19 nt, Artificial Sequence
  Description of Artificial Sequence: Synthetic oligonucleotide
auaaaaauaaaauaaaaau

SEQ ID NO: 4749 - RNA, 19 nt, Artificial Sequence
  Description of Artificial Sequence: Synthetic oligonucleotide
aauaaaaauaaaauaaaaa

SEQ ID NO: 4750 - RNA, 19 nt, Artificial Sequence
  Description of Artificial Sequence: Synthetic oligonucleotide
aaauaaaaauaaaauaaaa

SEQ ID NO: 4751 - RNA, 19 nt, Artificial Sequence
  Description of Artificial Sequence: Synthetic oligonucleotide
aaaauaaaaauaaaauaaa

SEQ ID NO: 4752 - RNA, 19 nt, Artificial Sequence
  Description of Artificial Sequence: Synthetic oligonucleotide
aaaaauaaaaauaaaauaa

SEQ ID NO: 4753 - RNA, 19 nt, Artificial Sequence
  Description of Artificial Sequence: Synthetic oligonucleotide
aaaaaauaaaaauaaaaua

SEQ ID NO: 4754 - RNA, 19 nt, Artificial Sequence
  Description of Artificial Sequence: Synthetic oligonucleotide
aaaaaaauaaaaauaaaau

SEQ ID NO: 4755 - RNA, 19 nt, Artificial Sequence
  Description of Artificial Sequence: Synthetic oligonucleotide
aaaaaaaauaaaaauaaaa

SEQ ID NO: 4756 - RNA, 19 nt, Artificial Sequence
  Description of Artificial Sequence: Synthetic oligonucleotide
aaaaaaaaauaaaaauaaa

SEQ ID NO: 4757 - RNA, 19 nt, Artificial Sequence
  Description of Artificial Sequence: Synthetic oligonucleotide
aaaaaaaaaauaaaaauaa

SEQ ID NO: 4758 - RNA, 19 nt, Artificial Sequence
  Description of Artificial Sequence: Synthetic oligonucleotide
uaaaaaaaaaauaaaaaua

SEQ ID NO: 4759 - RNA, 19 nt, Artificial Sequence
  Description of Artificial Sequence: Synthetic oligonucleotide
cuaaaaaaaaaauaaaaau

SEQ ID NO: 4760 - RNA, 19 nt, Artificial Sequence
  Description of Artificial Sequence: Synthetic oligonucleotide
gcuaaaaaaaaaauaaaaa

SEQ ID NO: 4761 - RNA, 19 nt, Artificial Sequence
  Description of Artificial Sequence: Synthetic oligonucleotide
ugcuaaaaaaaaaauaaaa

SEQ ID NO: 4762 - RNA, 19 nt, Artificial Sequence
  Description of Artificial Sequence: Synthetic oligonucleotide
augcuaaaaaaaaaauaaa

SEQ ID NO: 4763 - RNA, 19 nt, Artificial Sequence
  Description of Artificial Sequence: Synthetic oligonucleotide
gaugcuaaaaaaaaaauaa

SEQ ID NO: 4764 - RNA, 19 nt, Artificial Sequence
  Description of Artificial Sequence: Synthetic oligonucleotide
ggaugcuaaaaaaaaaaua

SEQ ID NO: 4765 - RNA, 19 nt, Artificial Sequence
  Description of Artificial Sequence: Synthetic oligonucleotide
aggaugcuaaaaaaaaaau

SEQ ID NO: 4766 - RNA, 19 nt, Artificial Sequence
  Description of Artificial Sequence: Synthetic oligonucleotide
aaggaugcuaaaaaaaaaa

SEQ ID NO: 4767 - RNA, 19 nt, Artificial Sequence
  Description of Artificial Sequence: Synthetic oligonucleotide
aaaggaugcuaaaaaaaaa

SEQ ID NO: 4768 - RNA, 19 nt, Artificial Sequence
  Description of Artificial Sequence: Synthetic oligonucleotide
aaaaggaugcuaaaaaaaa

SEQ ID NO: 4769 - RNA, 19 nt, Artificial Sequence
  Description of Artificial Sequence: Synthetic oligonucleotide
caaaaggaugcuaaaaaaa

SEQ ID NO: 4770 - RNA, 19 nt, Artificial Sequence
  Description of Artificial Sequence: Synthetic oligonucleotide
ccaaaaggaugcuaaaaaa

SEQ ID NO: 4771 - RNA, 19 nt, Artificial Sequence
  Description of Artificial Sequence: Synthetic oligonucleotide
cccaaaaggaugcuaaaaa

SEQ ID NO: 4772 - RNA, 19 nt, Artificial Sequence
  Description of Artificial Sequence: Synthetic oligonucleotide
ccccaaaaggaugcuaaaa

SEQ ID NO: 4773 - RNA, 19 nt, Artificial Sequence
  Description of Artificial Sequence: Synthetic oligonucleotide
gccccaaaaggaugcuaaa

SEQ ID NO: 4774 - RNA, 19 nt, Artificial Sequence
  Description of Artificial Sequence: Synthetic oligonucleotide
agccccaaaaggaugcuaa

SEQ ID NO: 4775 - RNA, 19 nt, Artificial Sequence
  Description of Artificial Sequence: Synthetic oligonucleotide
aagccccaaaaggaugcua

SEQ ID NO: 4776 - RNA, 19 nt, Artificial Sequence
  Description of Artificial Sequence: Synthetic oligonucleotide
gaagccccaaaaggaugcu

SEQ ID NO: 4777 - RNA, 19 nt, Artificial Sequence
  Description of Artificial Sequence: Synthetic oligonucleotide
ugaagccccaaaaggaugc

SEQ ID NO: 4778 - RNA, 19 nt, Artificial Sequence
  Description of Artificial Sequence: Synthetic oligonucleotide
gugaagccccaaaaggaug

SEQ ID NO: 4779 - RNA, 19 nt, Artificial Sequence
  Description of Artificial Sequence: Synthetic oligonucleotide
agugaagccccaaaaggau

SEQ ID NO: 4780 - RNA, 19 nt, Artificial Sequence
  Description of Artificial Sequence: Synthetic oligonucleotide
gagugaagccccaaaagga

SEQ ID NO: 4781 - RNA, 19 nt, Artificial Sequence
  Description of Artificial Sequence: Synthetic oligonucleotide
agagugaagccccaaaagg

SEQ ID NO: 4782 - RNA, 19 nt, Artificial Sequence
  Description of Artificial Sequence: Synthetic oligonucleotide
gagagugaagccccaaaag

SEQ ID NO: 4783 - RNA, 19 nt, Artificial Sequence
  Description of Artificial Sequence: Synthetic oligonucleotide
ugagagugaagccccaaaa

SEQ ID NO: 4784 - RNA, 19 nt, Artificial Sequence
  Description of Artificial Sequence: Synthetic oligonucleotide
cugagagugaagccccaaa

SEQ ID NO: 4785 - RNA, 19 nt, Artificial Sequence
  Description of Artificial Sequence: Synthetic oligonucleotide
ucugagagugaagccccaa

SEQ ID NO: 4786 - RNA, 19 nt, Artificial Sequence
  Description of Artificial Sequence: Synthetic oligonucleotide
cucugagagugaagcccca

SEQ ID NO: 4787 - RNA, 19 nt, Artificial Sequence
  Description of Artificial Sequence: Synthetic oligonucleotide
gcucugagagugaagcccc

SEQ ID NO: 4788 - RNA, 19 nt, Artificial Sequence
  Description of Artificial Sequence: Synthetic oligonucleotide
ggcucugagagugaagccc

SEQ ID NO: 4789 - RNA, 19 nt, Artificial Sequence
  Description of Artificial Sequence: Synthetic oligonucleotide
uggcucugagagugaagcc

SEQ ID NO: 4790 - RNA, 19 nt, Artificial Sequence
  Description of Artificial Sequence: Synthetic oligonucleotide
cuggcucugagagugaagc

SEQ ID NO: 4791 - RNA, 19 nt, Artificial Sequence
  Description of Artificial Sequence: Synthetic oligonucleotide
acuggcucugagagugaag

SEQ ID NO: 4792 - RNA, 19 nt, Artificial Sequence
  Description of Artificial Sequence: Synthetic oligonucleotide
aacuggcucugagagugaa

SEQ ID NO: 4793 - RNA, 19 nt, Artificial Sequence
  Description of Artificial Sequence: Synthetic oligonucleotide
aaacuggcucugagaguga

SEQ ID NO: 4794 - RNA, 19 nt, Artificial Sequence
  Description of Artificial Sequence: Synthetic oligonucleotide
aaaacuggcucugagagug

SEQ ID NO: 4795 - RNA, 19 nt, Artificial Sequence
  Description of Artificial Sequence: Synthetic oligonucleotide
aaaaacuggcucugagagu

SEQ ID NO: 4796 - RNA, 19 nt, Artificial Sequence
  Description of Artificial Sequence: Synthetic oligonucleotide
uaaaaacuggcucugagag

SEQ ID NO: 4797 - RNA, 19 nt, Artificial Sequence
  Description of Artificial Sequence: Synthetic oligonucleotide
uuaaaaacuggcucugaga

SEQ ID NO: 4798 - RNA, 19 nt, Artificial Sequence
  Description of Artificial Sequence: Synthetic oligonucleotide
cuuaaaaacuggcucugag

SEQ ID NO: 4799 - RNA, 19 nt, Artificial Sequence
  Description of Artificial Sequence: Synthetic oligonucleotide
ccuuaaaaacuggcucuga

SEQ ID NO: 4800 - RNA, 19 nt, Artificial Sequence
  Description of Artificial Sequence: Synthetic oligonucleotide
cccuuaaaaacuggcucug

SEQ ID NO: 4801 - RNA, 19 nt, Artificial Sequence
  Description of Artificial Sequence: Synthetic oligonucleotide
ucccuuaaaaacuggcucu

SEQ ID NO: 4802 - RNA, 19 nt, Artificial Sequence
  Description of Artificial Sequence: Synthetic oligonucleotide
gucccuuaaaaacuggcuc

SEQ ID NO: 4803 - RNA, 19 nt, Artificial Sequence
  Description of Artificial Sequence: Synthetic oligonucleotide
ugucccuuaaaaacuggcu

SEQ ID NO: 4804 - RNA, 19 nt, Artificial Sequence
  Description of Artificial Sequence: Synthetic oligonucleotide
gugucccuuaaaaacuggc

SEQ ID NO: 4805 - RNA, 19 nt, Artificial Sequence
  Description of Artificial Sequence: Synthetic oligonucleotide
ggugucccuuaaaaacugg

SEQ ID NO: 4806 - RNA, 19 nt, Artificial Sequence
  Description of Artificial Sequence: Synthetic oligonucleotide
uggugucccuuaaaaacug

SEQ ID NO: 4807 - RNA, 19 nt, Artificial Sequence
  Description of Artificial Sequence: Synthetic oligonucleotide
cuggugucccuuaaaaacu

SEQ ID NO: 4808 - RNA, 19 nt, Artificial Sequence
  Description of Artificial Sequence: Synthetic oligonucleotide
ucuggugucccuuaaaaac

SEQ ID NO: 4809 - RNA, 19 nt, Artificial Sequence
  Description of Artificial Sequence: Synthetic oligonucleotide
cucuggugucccuuaaaaa

SEQ ID NO: 4810 - RNA, 19 nt, Artificial Sequence
  Description of Artificial Sequence: Synthetic oligonucleotide
gcucuggugucccuuaaaa

SEQ ID NO: 4811 - RNA, 19 nt, Artificial Sequence
  Description of Artificial Sequence: Synthetic oligonucleotide
ggcucuggugucccuuaaa

SEQ ID NO: 4812 - RNA, 19 nt, Artificial Sequence
  Description of Artificial Sequence: Synthetic oligonucleotide
cggcucuggugucccuuaa

SEQ ID NO: 4813 - RNA, 19 nt, Artificial Sequence
  Description of Artificial Sequence: Synthetic oligonucleotide
gcggcucuggugucccuua

SEQ ID NO: 4814 - RNA, 19 nt, Artificial Sequence
  Description of Artificial Sequence: Synthetic oligonucleotide
ugcggcucuggugucccuu

SEQ ID NO: 4815 - RNA, 19 nt, Artificial Sequence
  Description of Artificial Sequence: Synthetic oligonucleotide
cugcggcucuggugucccu

SEQ ID NO: 4816 - RNA, 19 nt, Artificial Sequence
  Description of Artificial Sequence: Synthetic oligonucleotide
gcugcggcucugguguccc

SEQ ID NO: 4817 - RNA, 19 nt, Artificial Sequence
  Description of Artificial Sequence: Synthetic oligonucleotide
ggcugcggcucuggugucc

SEQ ID NO: 4818 - RNA, 19 nt, Artificial Sequence
  Description of Artificial Sequence: Synthetic oligonucleotide
aggcugcggcucugguguc

SEQ ID NO: 4819 - RNA, 19 nt, Artificial Sequence
  Description of Artificial Sequence: Synthetic oligonucleotide
caggcugcggcucuggugu

SEQ ID NO: 4820 - RNA, 19 nt, Artificial Sequence
  Description of Artificial Sequence: Synthetic oligonucleotide
gcaggcugcggcucuggug

SEQ ID NO: 4821 - RNA, 19 nt, Artificial Sequence
  Description of Artificial Sequence: Synthetic oligonucleotide
agcaggcugcggcucuggu

SEQ ID NO: 4822 - RNA, 19 nt, Artificial Sequence
  Description of Artificial Sequence: Synthetic oligonucleotide
gagcaggcugcggcucugg

SEQ ID NO: 4823 - RNA, 19 nt, Artificial Sequence
  Description of Artificial Sequence: Synthetic oligonucleotide
agagcaggcugcggcucug

SEQ ID NO: 4824 - RNA, 19 nt, Artificial Sequence
  Description of Artificial Sequence: Synthetic oligonucleotide
cagagcaggcugcggcucu

SEQ ID NO: 4825 - RNA, 19 nt, Artificial Sequence
  Description of Artificial Sequence: Synthetic oligonucleotide
ucagagcaggcugcggcuc

SEQ ID NO: 4826 - RNA, 19 nt, Artificial Sequence
  Description of Artificial Sequence: Synthetic oligonucleotide
aucagagcaggcugcggcu

SEQ ID NO: 4827 - RNA, 19 nt, Artificial Sequence
  Description of Artificial Sequence: Synthetic oligonucleotide
aaucagagcaggcugcggc

SEQ ID NO: 4828 - RNA, 19 nt, Artificial Sequence
  Description of Artificial Sequence: Synthetic oligonucleotide
gaaucagagcaggcugcgg

SEQ ID NO: 4829 - RNA, 19 nt, Artificial Sequence
  Description of Artificial Sequence: Synthetic oligonucleotide
agaaucagagcaggcugcg

SEQ ID NO: 4830 - RNA, 19 nt, Artificial Sequence
  Description of Artificial Sequence: Synthetic oligonucleotide
uagaaucagagcaggcugc

SEQ ID NO: 4831 - RNA, 19 nt, Artificial Sequence
  Description of Artificial Sequence: Synthetic oligonucleotide
auagaaucagagcaggcug

SEQ ID NO: 4832 - RNA, 19 nt, Artificial Sequence
  Description of Artificial Sequence: Synthetic oligonucleotide
cauagaaucagagcaggcu

SEQ ID NO: 4833 - RNA, 19 nt, Artificial Sequence
  Description of Artificial Sequence: Synthetic oligonucleotide
ccauagaaucagagcaggc

SEQ ID NO: 4834 - RNA, 19 nt, Artificial Sequence
  Description of Artificial Sequence: Synthetic oligonucleotide
gccauagaaucagagcagg

SEQ ID NO: 4835 - RNA, 19 nt, Artificial Sequence
  Description of Artificial Sequence: Synthetic oligonucleotide
agccauagaaucagagcag

SEQ ID NO: 4836 - RNA, 19 nt, Artificial Sequence
  Description of Artificial Sequence: Synthetic oligonucleotide
aagccauagaaucagagca

SEQ ID NO: 4837 - RNA, 19 nt, Artificial Sequence
  Description of Artificial Sequence: Synthetic oligonucleotide
caagccauagaaucagagc

SEQ ID NO: 4838 - RNA, 19 nt, Artificial Sequence
  Description of Artificial Sequence: Synthetic oligonucleotide
ccaagccauagaaucagag

SEQ ID NO: 4839 - RNA, 19 nt, Artificial Sequence
  Description of Artificial Sequence: Synthetic oligonucleotide
accaagccauagaaucaga

SEQ ID NO: 4840 - RNA, 19 nt, Artificial Sequence
  Description of Artificial Sequence: Synthetic oligonucleotide
aaccaagccauagaaucag

SEQ ID NO: 4841 - RNA, 19 nt, Artificial Sequence
  Description of Artificial Sequence: Synthetic oligonucleotide
caaccaagccauagaauca

SEQ ID NO: 4842 - RNA, 19 nt, Artificial Sequence
  Description of Artificial Sequence: Synthetic oligonucleotide
acaaccaagccauagaauc

SEQ ID NO: 4843 - RNA, 19 nt, Artificial Sequence
  Description of Artificial Sequence: Synthetic oligonucleotide
aacaaccaagccauagaau

SEQ ID NO: 4844 - RNA, 19 nt, Artificial Sequence
  Description of Artificial Sequence: Synthetic oligonucleotide
uaacaaccaagccauagaa

SEQ ID NO: 4845 - RNA, 19 nt, Artificial Sequence
  Description of Artificial Sequence: Synthetic oligonucleotide
guaacaaccaagccauaga

SEQ ID NO: 4846 - RNA, 19 nt, Artificial Sequence
  Description of Artificial Sequence: Synthetic oligonucleotide
aguaacaaccaagccauag

SEQ ID NO: 4847 - RNA, 19 nt, Artificial Sequence
  Description of Artificial Sequence: Synthetic oligonucleotide
uaguaacaaccaagccaua

SEQ ID NO: 4848 - RNA, 19 nt, Artificial Sequence
  Description of Artificial Sequence: Synthetic oligonucleotide
auaguaacaaccaagccau

SEQ ID NO: 4849 - RNA, 19 nt, Artificial Sequence
  Description of Artificial Sequence: Synthetic oligonucleotide
uauaguaacaaccaagcca

SEQ ID NO: 4850 - RNA, 19 nt, Artificial Sequence
  Description of Artificial Sequence: Synthetic oligonucleotide
uuauaguaacaaccaagcc

SEQ ID NO: 4851 - RNA, 19 nt, Artificial Sequence
  Description of Artificial Sequence: Synthetic oligonucleotide
cuuauaguaacaaccaagc

SEQ ID NO: 4852 - RNA, 19 nt, Artificial Sequence
  Description of Artificial Sequence: Synthetic oligonucleotide
ucuuauaguaacaaccaag

SEQ ID NO: 4853 - RNA, 19 nt, Artificial Sequence
  Description of Artificial Sequence: Synthetic oligonucleotide
cucuuauaguaacaaccaa

SEQ ID NO: 4854 - RNA, 19 nt, Artificial Sequence
  Description of Artificial Sequence: Synthetic oligonucleotide
acucuuauaguaacaacca

SEQ ID NO: 4855 - RNA, 19 nt, Artificial Sequence
  Description of Artificial Sequence: Synthetic oligonucleotide
uacucuuauaguaacaacc

SEQ ID NO: 4856 - RNA, 19 nt, Artificial Sequence
  Description of Artificial Sequence: Synthetic oligonucleotide
uuacucuuauaguaacaac

SEQ ID NO: 4857 - RNA, 19 nt, Artificial Sequence
  Description of Artificial Sequence: Synthetic oligonucleotide
auuacucuuauaguaacaa

SEQ ID NO: 4858 - RNA, 19 nt, Artificial Sequence
  Description of Artificial Sequence: Synthetic oligonucleotide
aauuacucuuauaguaaca

SEQ ID NO: 4859 - RNA, 19 nt, Artificial Sequence
  Description of Artificial Sequence: Synthetic oligonucleotide
caauuacucuuauaguaac

SEQ ID NO: 4860 - RNA, 19 nt, Artificial Sequence
  Description of Artificial Sequence: Synthetic oligonucleotide
gcaauuacucuuauaguaa

SEQ ID NO: 4861 - RNA, 19 nt, Artificial Sequence
  Description of Artificial Sequence: Synthetic oligonucleotide
ggcaauuacucuuauagua

SEQ ID NO: 4862 - RNA, 19 nt, Artificial Sequence
  Description of Artificial Sequence: Synthetic oligonucleotide
aggcaauuacucuuauagu

SEQ ID NO: 4863 - RNA, 19 nt, Artificial Sequence
  Description of Artificial Sequence: Synthetic oligonucleotide
uaggcaauuacucuuauag

SEQ ID NO: 4864 - RNA, 19 nt, Artificial Sequence
  Description of Artificial Sequence: Synthetic oligonucleotide
uuaggcaauuacucuuaua

SEQ ID NO: 4865 - RNA, 19 nt, Artificial Sequence
  Description of Artificial Sequence: Synthetic oligonucleotide
guuaggcaauuacucuuau

SEQ ID NO: 4866 - RNA, 19 nt, Artificial Sequence
  Description of Artificial Sequence: Synthetic oligonucleotide
aguuaggcaauuacucuua

SEQ ID NO: 4867 - RNA, 19 nt, Artificial Sequence
  Description of Artificial Sequence: Synthetic oligonucleotide
aaguuaggcaauuacucuu

SEQ ID NO: 4868 - RNA, 19 nt, Artificial Sequence
  Description of Artificial Sequence: Synthetic oligonucleotide
caaguuaggcaauuacucu

SEQ ID NO: 4869 - RNA, 19 nt, Artificial Sequence
  Description of Artificial Sequence: Synthetic oligonucleotide
ucaaguuaggcaauuacuc

SEQ ID NO: 4870 - RNA, 19 nt, Artificial Sequence
  Description of Artificial Sequence: Synthetic oligonucleotide
aucaaguuaggcaauuacu

SEQ ID NO: 4871 - RNA, 19 nt, Artificial Sequence
  Description of Artificial Sequence: Synthetic oligonucleotide
aaucaaguuaggcaauuac

SEQ ID NO: 4872 - RNA, 19 nt, Artificial Sequence
  Description of Artificial Sequence: Synthetic oligonucleotide
aaaucaaguuaggcaauua

SEQ ID NO: 4873 - RNA, 19 nt, Artificial Sequence
  Description of Artificial Sequence: Synthetic oligonucleotide
aaaaucaaguuaggcaauu

SEQ ID NO: 4874 - RNA, 19 nt, Artificial Sequence
  Description of Artificial Sequence: Synthetic oligonucleotide
aaaaaucaaguuaggcaau

SEQ ID NO: 4875 - RNA, 19 nt, Artificial Sequence
  Description of Artificial Sequence: Synthetic oligonucleotide
gaaaaaucaaguuaggcaa

SEQ ID NO: 4876 - RNA, 19 nt, Artificial Sequence
  Description of Artificial Sequence: Synthetic oligonucleotide
ugaaaaaucaaguuaggca

SEQ ID NO: 4877 - RNA, 19 nt, Artificial Sequence
  Description of Artificial Sequence: Synthetic oligonucleotide
augaaaaaucaaguuaggc

SEQ ID NO: 4878 - RNA, 19 nt, Artificial Sequence
  Description of Artificial Sequence: Synthetic oligonucleotide
gaugaaaaaucaaguuagg

SEQ ID NO: 4879 - RNA, 19 nt, Artificial Sequence
  Description of Artificial Sequence: Synthetic oligonucleotide
agaugaaaaaucaaguuag

SEQ ID NO: 4880 - RNA, 19 nt, Artificial Sequence
  Description of Artificial Sequence: Synthetic oligonucleotide
gagaugaaaaaucaaguua

SEQ ID NO: 4881 - RNA, 19 nt, Artificial Sequence
  Description of Artificial Sequence: Synthetic oligonucleotide
agagaugaaaaaucaaguu

SEQ ID NO: 4882 - RNA, 19 nt, Artificial Sequence
  Description of Artificial Sequence: Synthetic oligonucleotide
aagagaugaaaaaucaagu

SEQ ID NO: 4883 - RNA, 19 nt, Artificial Sequence
  Description of Artificial Sequence: Synthetic oligonucleotide
aaagagaugaaaaaucaag

SEQ ID NO: 4884 - RNA, 19 nt, Artificial Sequence
  Description of Artificial Sequence: Synthetic oligonucleotide
uaaagagaugaaaaaucaa

SEQ ID NO: 4885 - RNA, 19 nt, Artificial Sequence
  Description of Artificial Sequence: Synthetic oligonucleotide
uuaaagagaugaaaaauca

SEQ ID NO: 4886 - RNA, 19 nt, Artificial Sequence
  Description of Artificial Sequence: Synthetic oligonucleotide
guuaaagagaugaaaaauc

SEQ ID NO: 4887 - RNA, 19 nt, Artificial Sequence
  Description of Artificial Sequence: Synthetic oligonucleotide
gguuaaagagaugaaaaau

SEQ ID NO: 4888 - RNA, 19 nt, Artificial Sequence
  Description of Artificial Sequence: Synthetic oligonucleotide
ugguuaaagagaugaaaaa

SEQ ID NO: 4889 - RNA, 19 nt, Artificial Sequence
  Description of Artificial Sequence: Synthetic oligonucleotide
uugguuaaagagaugaaaa

SEQ ID NO: 4890 - RNA, 19 nt, Artificial Sequence
  Description of Artificial Sequence: Synthetic oligonucleotide
uuugguuaaagagaugaaa

SEQ ID NO: 4891 - RNA, 19 nt, Artificial Sequence
  Description of Artificial Sequence: Synthetic oligonucleotide
guuugguuaaagagaugaa

SEQ ID NO: 4892 - RNA, 19 nt, Artificial Sequence
  Description of Artificial Sequence: Synthetic oligonucleotide
aguuugguuaaagagauga

SEQ ID NO: 4893 - RNA, 19 nt, Artificial Sequence
  Description of Artificial Sequence: Synthetic oligonucleotide
aaguuugguuaaagagaug

SEQ ID NO: 4894 - RNA, 19 nt, Artificial Sequence
  Description of Artificial Sequence: Synthetic oligonucleotide
caaguuugguuaaagagau

SEQ ID NO: 4895 - RNA, 19 nt, Artificial Sequence
  Description of Artificial Sequence: Synthetic oligonucleotide
acaaguuugguuaaagaga

SEQ ID NO: 4896 - RNA, 19 nt, Artificial Sequence
  Description of Artificial Sequence: Synthetic oligonucleotide
cacaaguuugguuaaagag

SEQ ID NO: 4897 - RNA, 19 nt, Artificial Sequence
  Description of Artificial Sequence: Synthetic oligonucleotide
ccacaaguuugguuaaaga

SEQ ID NO: 4898 - RNA, 19 nt, Artificial Sequence
  Description of Artificial Sequence: Synthetic oligonucleotide
gccacaaguuugguuaaag

SEQ ID NO: 4899 - RNA, 19 nt, Artificial Sequence
  Description of Artificial Sequence: Synthetic oligonucleotide
ggccacaaguuugguuaaa

SEQ ID NO: 4900 - RNA, 19 nt, Artificial Sequence
  Description of Artificial Sequence: Synthetic oligonucleotide
uggccacaaguuugguuaa

SEQ ID NO: 4901 - RNA, 19 nt, Artificial Sequence
  Description of Artificial Sequence: Synthetic oligonucleotide
uuggccacaaguuugguua

SEQ ID NO: 4902 - RNA, 19 nt, Artificial Sequence
  Description of Artificial Sequence: Synthetic oligonucleotide
uuuggccacaaguuugguu

SEQ ID NO: 4903 - RNA, 19 nt, Artificial Sequence
  Description of Artificial Sequence: Synthetic oligonucleotide
uuuuggccacaaguuuggu

SEQ ID NO: 4904 - RNA, 19 nt, Artificial Sequence
  Description of Artificial Sequence: Synthetic oligonucleotide
cuuuuggccacaaguuugg

SEQ ID NO: 4905 - RNA, 19 nt, Artificial Sequence
  Description of Artificial Sequence: Synthetic oligonucleotide
ucuuuuggccacaaguuug

SEQ ID NO: 4906 - RNA, 19 nt, Artificial Sequence
  Description of Artificial Sequence: Synthetic oligonucleotide
aucuuuuggccacaaguuu

SEQ ID NO: 4907 - RNA, 19 nt, Artificial Sequence
  Description of Artificial Sequence: Synthetic oligonucleotide
uaucuuuuggccacaaguu

SEQ ID NO: 4908 - RNA, 19 nt, Artificial Sequence
  Description of Artificial Sequence: Synthetic oligonucleotide
auaucuuuuggccacaagu

SEQ ID NO: 4909 - RNA, 19 nt, Artificial Sequence
  Description of Artificial Sequence: Synthetic oligonucleotide
aauaucuuuuggccacaag

SEQ ID NO: 4910 - RNA, 19 nt, Artificial Sequence
  Description of Artificial Sequence: Synthetic oligonucleotide
aaauaucuuuuggccacaa

SEQ ID NO: 4911 - RNA, 19 nt, Artificial Sequence
  Description of Artificial Sequence: Synthetic oligonucleotide
caaauaucuuuuggccaca

SEQ ID NO: 4912 - RNA, 19 nt, Artificial Sequence
  Description of Artificial Sequence: Synthetic oligonucleotide
ucaaauaucuuuuggccac

SEQ ID NO: 4913 - RNA, 19 nt, Artificial Sequence
  Description of Artificial Sequence: Synthetic oligonucleotide
gucaaauaucuuuuggcca

SEQ ID NO: 4914 - RNA, 19 nt, Artificial Sequence
  Description of Artificial Sequence: Synthetic oligonucleotide
ggucaaauaucuuuuggcc

SEQ ID NO: 4915 - RNA, 19 nt, Artificial Sequence
  Description of Artificial Sequence: Synthetic oligonucleotide
cggucaaauaucuuuuggc

SEQ ID NO: 4916 - RNA, 19 nt, Artificial Sequence
  Description of Artificial Sequence: Synthetic oligonucleotide
acggucaaauaucuuuugg

SEQ ID NO: 4917 - RNA, 19 nt, Artificial Sequence
  Description of Artificial Sequence: Synthetic oligonucleotide
aacggucaaauaucuuuug

SEQ ID NO: 4918 - RNA, 19 nt, Artificial Sequence
  Description of Artificial Sequence: Synthetic oligonucleotide
aaacggucaaauaucuuuu

SEQ ID NO: 4919 - RNA, 19 nt, Artificial Sequence
  Description of Artificial Sequence: Synthetic oligonucleotide
gaaacggucaaauaucuuu

SEQ ID NO: 4920 - RNA, 19 nt, Artificial Sequence
  Description of Artificial Sequence: Synthetic oligonucleotide
ggaaacggucaaauaucuu

SEQ ID NO: 4921 - RNA, 19 nt, Artificial Sequence
  Description of Artificial Sequence: Synthetic oligonucleotide
uggaaacggucaaauaucu

SEQ ID NO: 4922 - RNA, 19 nt, Artificial Sequence
  Description of Artificial Sequence: Synthetic oligonucleotide
uuggaaacggucaaauauc

SEQ ID NO: 4923 - RNA, 19 nt, Artificial Sequence
  Description of Artificial Sequence: Synthetic oligonucleotide
uuuggaaacggucaaauau

SEQ ID NO: 4924 - RNA, 19 nt, Artificial Sequence
  Description of Artificial Sequence: Synthetic oligonucleotide
uuuuggaaacggucaaaua

SEQ ID NO: 4925 - RNA, 19 nt, Artificial Sequence
  Description of Artificial Sequence: Synthetic oligonucleotide
auuuuggaaacggucaaau

SEQ ID NO: 4926 - RNA, 19 nt, Artificial Sequence
  Description of Artificial Sequence: Synthetic oligonucleotide
aauuuuggaaacggucaaa

SEQ ID NO: 4927 - RNA, 19 nt, Artificial Sequence
  Description of Artificial Sequence: Synthetic oligonucleotide
gaauuuuggaaacggucaa

SEQ ID NO: 4928 - RNA, 19 nt, Artificial Sequence
  Description of Artificial Sequence: Synthetic oligonucleotide
ugaauuuuggaaacgguca

SEQ ID NO: 4929 - RNA, 19 nt, Artificial Sequence
  Description of Artificial Sequence: Synthetic oligonucleotide
cugaauuuuggaaacgguc

SEQ ID NO: 4930 - RNA, 19 nt, Artificial Sequence
  Description of Artificial Sequence: Synthetic oligonucleotide
ucugaauuuuggaaacggu

SEQ ID NO: 4931 - RNA, 19 nt, Artificial Sequence
  Description of Artificial Sequence: Synthetic oligonucleotide
aucugaauuuuggaaacgg

SEQ ID NO: 4932 - RNA, 19 nt, Artificial Sequence
  Description of Artificial Sequence: Synthetic oligonucleotide
aaucugaauuuuggaaacg

SEQ ID NO: 4933 - RNA, 19 nt, Artificial Sequence
  Description of Artificial Sequence: Synthetic oligonucleotide
gaaucugaauuuuggaaac

SEQ ID NO: 4934 - RNA, 19 nt, Artificial Sequence
  Description of Artificial Sequence: Synthetic oligonucleotide
agaaucugaauuuuggaaa

SEQ ID NO: 4935 - RNA, 19 nt, Artificial Sequence
  Description of Artificial Sequence: Synthetic oligonucleotide
cagaaucugaauuuuggaa

SEQ ID NO: 4936 - RNA, 19 nt, Artificial Sequence
  Description of Artificial Sequence: Synthetic oligonucleotide
gcagaaucugaauuuugga

SEQ ID NO: 4937 - RNA, 19 nt, Artificial Sequence
  Description of Artificial Sequence: Synthetic oligonucleotide
ggcagaaucugaauuuugg

SEQ ID NO: 4938 - RNA, 19 nt, Artificial Sequence
  Description of Artificial Sequence: Synthetic oligonucleotide
aggcagaaucugaauuuug

SEQ ID NO: 4939 - RNA, 19 nt, Artificial Sequence
  Description of Artificial Sequence: Synthetic oligonucleotide
gaggcagaaucugaauuuu

SEQ ID NO: 4940 - RNA, 19 nt, Artificial Sequence
  Description of Artificial Sequence: Synthetic oligonucleotide
agaggcagaaucugaauuu

SEQ ID NO: 4941 - RNA, 19 nt, Artificial Sequence
  Description of Artificial Sequence: Synthetic oligonucleotide
cagaggcagaaucugaauu

SEQ ID NO: 4942 - RNA, 19 nt, Artificial Sequence
  Description of Artificial Sequence: Synthetic oligonucleotide
gcagaggcagaaucugaau

SEQ ID NO: 4943 - RNA, 19 nt, Artificial Sequence
  Description of Artificial Sequence: Synthetic oligonucleotide
cgcagaggcagaaucugaa

SEQ ID NO: 4944 - RNA, 19 nt, Artificial Sequence
  Description of Artificial Sequence: Synthetic oligonucleotide
ccgcagaggcagaaucuga

SEQ ID NO: 4945 - RNA, 19 nt, Artificial Sequence
  Description of Artificial Sequence: Synthetic oligonucleotide
uccgcagaggcagaaucug

SEQ ID NO: 4946 - RNA, 19 nt, Artificial Sequence
  Description of Artificial Sequence: Synthetic oligonucleotide
auccgcagaggcagaaucu

SEQ ID NO: 4947 - RNA, 19 nt, Artificial Sequence
  Description of Artificial Sequence: Synthetic oligonucleotide
uauccgcagaggcagaauc

SEQ ID NO: 4948 - RNA, 19 nt, Artificial Sequence
  Description of Artificial Sequence: Synthetic oligonucleotide
uuauccgcagaggcagaau

SEQ ID NO: 4949 - RNA, 19 nt, Artificial Sequence
  Description of Artificial Sequence: Synthetic oligonucleotide
uuuauccgcagaggcagaa

SEQ ID NO: 4950 - RNA, 19 nt, Artificial Sequence
  Description of Artificial Sequence: Synthetic oligonucleotide
auuuauccgcagaggcaga

SEQ ID NO: 4951 - RNA, 19 nt, Artificial Sequence
  Description of Artificial Sequence: Synthetic oligonucleotide
uauuuauccgcagaggcag

SEQ ID NO: 4952 - RNA, 19 nt, Artificial Sequence
  Description of Artificial Sequence: Synthetic oligonucleotide
auauuuauccgcagaggca

SEQ ID NO: 4953 - RNA, 19 nt, Artificial Sequence
  Description of Artificial Sequence: Synthetic oligonucleotide
aauauuuauccgcagaggc

SEQ ID NO: 4954 - RNA, 19 nt, Artificial Sequence
  Description of Artificial Sequence: Synthetic oligonucleotide
aaauauuuauccgcagagg

SEQ ID NO: 4955 - RNA, 19 nt, Artificial Sequence
  Description of Artificial Sequence: Synthetic oligonucleotide
caaauauuuauccgcagag

SEQ ID NO: 4956 - RNA, 19 nt, Artificial Sequence
  Description of Artificial Sequence: Synthetic oligonucleotide
gcaaauauuuauccgcaga

SEQ ID NO: 4957 - RNA, 19 nt, Artificial Sequence
  Description of Artificial Sequence: Synthetic oligonucleotide
ggcaaauauuuauccgcag

SEQ ID NO: 4958 - RNA, 19 nt, Artificial Sequence
  Description of Artificial Sequence: Synthetic oligonucleotide
uggcaaauauuuauccgca

SEQ ID NO: 4959 - RNA, 19 nt, Artificial Sequence
  Description of Artificial Sequence: Synthetic oligonucleotide
guggcaaauauuuauccgc

SEQ ID NO: 4960 - RNA, 19 nt, Artificial Sequence
  Description of Artificial Sequence: Synthetic oligonucleotide
cguggcaaauauuuauccg

SEQ ID NO: 4961 - RNA, 19 nt, Artificial Sequence
  Description of Artificial Sequence: Synthetic oligonucleotide
ucguggcaaauauuuaucc

SEQ ID NO: 4962 - RNA, 19 nt, Artificial Sequence
  Description of Artificial Sequence: Synthetic oligonucleotide
uucguggcaaauauuuauc

SEQ ID NO: 4963 - RNA, 19 nt, Artificial Sequence
  Description of Artificial Sequence: Synthetic oligonucleotide
auucguggcaaauauuuau

SEQ ID NO: 4964 - RNA, 19 nt, Artificial Sequence
  Description of Artificial Sequence: Synthetic oligonucleotide
cauucguggcaaauauuua

SEQ ID NO: 4965 - RNA, 19 nt, Artificial Sequence
  Description of Artificial Sequence: Synthetic oligonucleotide
ucauucguggcaaauauuu

SEQ ID NO: 4966 - RNA, 19 nt, Artificial Sequence
  Description of Artificial Sequence: Synthetic oligonucleotide
cucauucguggcaaauauu

SEQ ID NO: 4967 - RNA, 19 nt, Artificial Sequence
  Description of Artificial Sequence: Synthetic oligonucleotide
acucauucguggcaaauau

SEQ ID NO: 4968 - RNA, 19 nt, Artificial Sequence
  Description of Artificial Sequence: Synthetic oligonucleotide
uacucauucguggcaaaua

SEQ ID NO: 4969 - RNA, 19 nt, Artificial Sequence
  Description of Artificial Sequence: Synthetic oligonucleotide
uuacucauucguggcaaau

SEQ ID NO: 4970 - RNA, 19 nt, Artificial Sequence
  Description of Artificial Sequence: Synthetic oligonucleotide
guuacucauucguggcaaa

SEQ ID NO: 4971 - RNA, 19 nt, Artificial Sequence
  Description of Artificial Sequence: Synthetic oligonucleotide
aguuacucauucguggcaa

SEQ ID NO: 4972 - RNA, 19 nt, Artificial Sequence
  Description of Artificial Sequence: Synthetic oligonucleotide
gaguuacucauucguggca

SEQ ID NO: 4973 - RNA, 19 nt, Artificial Sequence
  Description of Artificial Sequence: Synthetic oligonucleotide
ggaguuacucauucguggc

SEQ ID NO: 4974 - RNA, 19 nt, Artificial Sequence
  Description of Artificial Sequence: Synthetic oligonucleotide
aggaguuacucauucgugg

SEQ ID NO: 4975 - RNA, 19 nt, Artificial Sequence
  Description of Artificial Sequence: Synthetic oligonucleotide
caggaguuacucauucgug

SEQ ID NO: 4976 - RNA, 19 nt, Artificial Sequence
  Description of Artificial Sequence: Synthetic oligonucleotide
acaggaguuacucauucgu

SEQ ID NO: 4977 - RNA, 19 nt, Artificial Sequence
  Description of Artificial Sequence: Synthetic oligonucleotide
gacaggaguuacucauucg

SEQ ID NO: 4978 - RNA, 19 nt, Artificial Sequence
  Description of Artificial Sequence: Synthetic oligonucleotide
ugacaggaguuacucauuc

SEQ ID NO: 4979 - RNA, 19 nt, Artificial Sequence
  Description of Artificial Sequence: Synthetic oligonucleotide
gugacaggaguuacucauu

SEQ ID NO: 4980 - RNA, 19 nt, Artificial Sequence
  Description of Artificial Sequence: Synthetic oligonucleotide
ggugacaggaguuacucau

SEQ ID NO: 4981 - RNA, 19 nt, Artificial Sequence
  Description of Artificial Sequence: Synthetic oligonucleotide
uggugacaggaguuacuca

SEQ ID NO: 4982 - RNA, 19 nt, Artificial Sequence
  Description of Artificial Sequence: Synthetic oligonucleotide
guggugacaggaguuacuc

SEQ ID NO: 4983 - RNA, 19 nt, Artificial Sequence
  Description of Artificial Sequence: Synthetic oligonucleotide
aguggugacaggaguuacu

SEQ ID NO: 4984 - RNA, 19 nt, Artificial Sequence
  Description of Artificial Sequence: Synthetic oligonucleotide
gaguggugacaggaguuac

SEQ ID NO: 4985 - RNA, 19 nt, Artificial Sequence
  Description of Artificial Sequence: Synthetic oligonucleotide
agaguggugacaggaguua

SEQ ID NO: 4986 - RNA, 19 nt, Artificial Sequence
  Description of Artificial Sequence: Synthetic oligonucleotide
cagaguggugacaggaguu

SEQ ID NO: 4987 - RNA, 19 nt, Artificial Sequence
  Description of Artificial Sequence: Synthetic oligonucleotide
ucagaguggugacaggagu

SEQ ID NO: 4988 - RNA, 19 nt, Artificial Sequence
  Description of Artificial Sequence: Synthetic oligonucleotide
uucagaguggugacaggag

SEQ ID NO: 4989 - RNA, 19 nt, Artificial Sequence
  Description of Artificial Sequence: Synthetic oligonucleotide
cuucagaguggugacagga

SEQ ID NO: 4990 - RNA, 19 nt, Artificial Sequence
  Description of Artificial Sequence: Synthetic oligonucleotide
ccuucagaguggugacagg

SEQ ID NO: 4991 - RNA, 19 nt, Artificial Sequence
  Description of Artificial Sequence: Synthetic oligonucleotide
accuucagaguggugacag

SEQ ID NO: 4992 - RNA, 19 nt, Artificial Sequence
  Description of Artificial Sequence: Synthetic oligonucleotide
gaccuucagaguggugaca

SEQ ID NO: 4993 - RNA, 19 nt, Artificial Sequence
  Description of Artificial Sequence: Synthetic oligonucleotide
ggaccuucagaguggugac

SEQ ID NO: 4994 - RNA, 19 nt, Artificial Sequence
  Description of Artificial Sequence: Synthetic oligonucleotide
uggaccuucagagugguga

SEQ ID NO: 4995 - RNA, 19 nt, Artificial Sequence
  Description of Artificial Sequence: Synthetic oligonucleotide
cuggaccuucagaguggug

SEQ ID NO: 4996 - RNA, 19 nt, Artificial Sequence
  Description of Artificial Sequence: Synthetic oligonucleotide
ucuggaccuucagaguggu

SEQ ID NO: 4997 - RNA, 19 nt, Artificial Sequence
  Description of Artificial Sequence: Synthetic oligonucleotide
gucuggaccuucagagugg

SEQ ID NO: 4998 - RNA, 19 nt, Artificial Sequence
  Description of Artificial Sequence: Synthetic oligonucleotide
ugucuggaccuucagagug

SEQ ID NO: 4999 - RNA, 19 nt, Artificial Sequence
  Description of Artificial Sequence: Synthetic oligonucleotide
cugucuggaccuucagagu

SEQ ID NO: 5000 - RNA, 19 nt, Artificial Sequence
  Description of Artificial Sequence: Synthetic oligonucleotide
ucugucuggaccuucagag

SEQ ID NO: 5001 - RNA, 19 nt, Artificial Sequence
  Description of Artificial Sequence: Synthetic oligonucleotide
uucugucuggaccuucaga

SEQ ID NO: 5002 - RNA, 19 nt, Artificial Sequence
  Description of Artificial Sequence: Synthetic oligonucleotide
cuucugucuggaccuucag

SEQ ID NO: 5003 - RNA, 19 nt, Artificial Sequence
  Description of Artificial Sequence: Synthetic oligonucleotide
ccuucugucuggaccuuca

SEQ ID NO: 5004 - RNA, 19 nt, Artificial Sequence
  Description of Artificial Sequence: Synthetic oligonucleotide
accuucugucuggaccuuc

SEQ ID NO: 5005 - RNA, 19 nt, Artificial Sequence
  Description of Artificial Sequence: Synthetic oligonucleotide
aaccuucugucuggaccuu

SEQ ID NO: 5006 - RNA, 19 nt, Artificial Sequence
  Description of Artificial Sequence: Synthetic oligonucleotide
aaaccuucugucuggaccu

SEQ ID NO: 5007 - RNA, 19 nt, Artificial Sequence
  Description of Artificial Sequence: Synthetic oligonucleotide
aaaaccuucugucuggacc

SEQ ID NO: 5008 - RNA, 19 nt, Artificial Sequence
  Description of Artificial Sequence: Synthetic oligonucleotide
caaaaccuucugucuggac

SEQ ID NO: 5009 - RNA, 19 nt, Artificial Sequence
  Description of Artificial Sequence: Synthetic oligonucleotide
ucaaaaccuucugucugga

SEQ ID NO: 5010 - RNA, 19 nt, Artificial Sequence
  Description of Artificial Sequence: Synthetic oligonucleotide
gucaaaaccuucugucugg

SEQ ID NO: 5011 - RNA, 19 nt, Artificial Sequence
  Description of Artificial Sequence: Synthetic oligonucleotide
ugucaaaaccuucugucug

SEQ ID NO: 5012 - RNA, 19 nt, Artificial Sequence
  Description of Artificial Sequence: Synthetic oligonucleotide
gugucaaaaccuucugucu

SEQ ID NO: 5013 - RNA, 19 nt, Artificial Sequence
  Description of Artificial Sequence: Synthetic oligonucleotide
ugugucaaaaccuucuguc

SEQ ID NO: 5014 - RNA, 19 nt, Artificial Sequence
  Description of Artificial Sequence: Synthetic oligonucleotide
augugucaaaaccuucugu

SEQ ID NO: 5015 - RNA, 19 nt, Artificial Sequence
  Description of Artificial Sequence: Synthetic oligonucleotide
aaugugucaaaaccuucug

SEQ ID NO: 5016 - RNA, 19 nt, Artificial Sequence
  Description of Artificial Sequence: Synthetic oligonucleotide
gaaugugucaaaaccuucu

SEQ ID NO: 5017 - RNA, 19 nt, Artificial Sequence
  Description of Artificial Sequence: Synthetic oligonucleotide
agaaugugucaaaaccuuc

SEQ ID NO: 5018 - RNA, 19 nt, Artificial Sequence
  Description of Artificial Sequence: Synthetic oligonucleotide
aagaaugugucaaaaccuu

SEQ ID NO: 5019 - RNA, 19 nt, Artificial Sequence
  Description of Artificial Sequence: Synthetic oligonucleotide
uaagaaugugucaaaaccu

SEQ ID NO: 5020 - RNA, 19 nt, Artificial Sequence
  Description of Artificial Sequence: Synthetic oligonucleotide
cuaagaaugugucaaaacc

SEQ ID NO: 5021 - RNA, 19 nt, Artificial Sequence
  Description of Artificial Sequence: Synthetic oligonucleotide
gcuaagaaugugucaaaac

SEQ ID NO: 5022 - RNA, 19 nt, Artificial Sequence
  Description of Artificial Sequence: Synthetic oligonucleotide
ugcuaagaaugugucaaaa

SEQ ID NO: 5023 - RNA, 19 nt, Artificial Sequence
  Description of Artificial Sequence: Synthetic oligonucleotide
gugcuaagaaugugucaaa

SEQ ID NO: 5024 - RNA, 19 nt, Artificial Sequence
  Description of Artificial Sequence: Synthetic oligonucleotide
agugcuaagaaugugucaa

SEQ ID NO: 5025 - RNA, 19 nt, Artificial Sequence
  Description of Artificial Sequence: Synthetic oligonucleotide
cagugcuaagaauguguca

SEQ ID NO: 5026 - RNA, 19 nt, Artificial Sequence
  Description of Artificial Sequence: Synthetic oligonucleotide
ucagugcuaagaauguguc

SEQ ID NO: 5027 - RNA, 19 nt, Artificial Sequence
  Description of Artificial Sequence: Synthetic oligonucleotide
uucagugcuaagaaugugu

SEQ ID NO: 5028 - RNA, 19 nt, Artificial Sequence
  Description of Artificial Sequence: Synthetic oligonucleotide
guucagugcuaagaaugug

SEQ ID NO: 5029 - RNA, 19 nt, Artificial Sequence
  Description of Artificial Sequence: Synthetic oligonucleotide
aguucagugcuaagaaugu

SEQ ID NO: 5030 - RNA, 19 nt, Artificial Sequence
  Description of Artificial Sequence: Synthetic oligonucleotide
gaguucagugcuaagaaug

SEQ ID NO: 5031 - RNA, 19 nt, Artificial Sequence
  Description of Artificial Sequence: Synthetic oligonucleotide
ggaguucagugcuaagaau

SEQ ID NO: 5032 - RNA, 19 nt, Artificial Sequence
  Description of Artificial Sequence: Synthetic oligonucleotide
aggaguucagugcuaagaa

SEQ ID NO: 5033 - RNA, 19 nt, Artificial Sequence
  Description of Artificial Sequence: Synthetic oligonucleotide
gaggaguucagugcuaaga

SEQ ID NO: 5034 - RNA, 19 nt, Artificial Sequence
  Description of Artificial Sequence: Synthetic oligonucleotide
agaggaguucagugcuaag

SEQ ID NO: 5035 - RNA, 19 nt, Artificial Sequence
  Description of Artificial Sequence: Synthetic oligonucleotide
cagaggaguucagugcuaa

SEQ ID NO: 5036 - RNA, 19 nt, Artificial Sequence
  Description of Artificial Sequence: Synthetic oligonucleotide
acagaggaguucagugcua

SEQ ID NO: 5037 - RNA, 19 nt, Artificial Sequence
  Description of Artificial Sequence: Synthetic oligonucleotide
cacagaggaguucagugcu

SEQ ID NO: 5038 - RNA, 19 nt, Artificial Sequence
  Description of Artificial Sequence: Synthetic oligonucleotide
ucacagaggaguucagugc

SEQ ID NO: 5039 - RNA, 19 nt, Artificial Sequence
  Description of Artificial Sequence: Synthetic oligonucleotide
aucacagaggaguucagug

SEQ ID NO: 5040 - RNA, 19 nt, Artificial Sequence
  Description of Artificial Sequence: Synthetic oligonucleotide
gaucacagaggaguucagu

SEQ ID NO: 5041 - RNA, 19 nt, Artificial Sequence
  Description of Artificial Sequence: Synthetic oligonucleotide
agaucacagaggaguucag

SEQ ID NO: 5042 - RNA, 19 nt, Artificial Sequence
  Description of Artificial Sequence: Synthetic oligonucleotide
uagaucacagaggaguuca

SEQ ID NO: 5043 - RNA, 19 nt, Artificial Sequence
  Description of Artificial Sequence: Synthetic oligonucleotide
cuagaucacagaggaguuc

SEQ ID NO: 5044 - RNA, 19 nt, Artificial Sequence
  Description of Artificial Sequence: Synthetic oligonucleotide
ccuagaucacagaggaguu

SEQ ID NO: 5045 - RNA, 19 nt, Artificial Sequence
  Description of Artificial Sequence: Synthetic oligonucleotide
uccuagaucacagaggagu

SEQ ID NO: 5046 - RNA, 19 nt, Artificial Sequence
  Description of Artificial Sequence: Synthetic oligonucleotide
auccuagaucacagaggag

SEQ ID NO: 5047 - RNA, 19 nt, Artificial Sequence
  Description of Artificial Sequence: Synthetic oligonucleotide
cauccuagaucacagagga

SEQ ID NO: 5048 - RNA, 19 nt, Artificial Sequence
  Description of Artificial Sequence: Synthetic oligonucleotide
ucauccuagaucacagagg

SEQ ID NO: 5049 - RNA, 19 nt, Artificial Sequence
  Description of Artificial Sequence: Synthetic oligonucleotide
aucauccuagaucacagag

SEQ ID NO: 5050 - RNA, 19 nt, Artificial Sequence
  Description of Artificial Sequence: Synthetic oligonucleotide
gaucauccuagaucacaga

SEQ ID NO: 5051 - RNA, 19 nt, Artificial Sequence
  Description of Artificial Sequence: Synthetic oligonucleotide
agaucauccuagaucacag

SEQ ID NO: 5052 - RNA, 19 nt, Artificial Sequence
  Description of Artificial Sequence: Synthetic oligonucleotide
cagaucauccuagaucaca

SEQ ID NO: 5053 - RNA, 19 nt, Artificial Sequence
  Description of Artificial Sequence: Synthetic oligonucleotide
acagaucauccuagaucac

SEQ ID NO: 5054 - RNA, 19 nt, Artificial Sequence
  Description of Artificial Sequence: Synthetic oligonucleotide
aacagaucauccuagauca

SEQ ID NO: 5055 - RNA, 19 nt, Artificial Sequence
  Description of Artificial Sequence: Synthetic oligonucleotide
gaacagaucauccuagauc

SEQ ID NO: 5056 - RNA, 19 nt, Artificial Sequence
  Description of Artificial Sequence: Synthetic oligonucleotide
ggaacagaucauccuagau

SEQ ID NO: 5057 - RNA, 19 nt, Artificial Sequence
  Description of Artificial Sequence: Synthetic oligonucleotide
gggaacagaucauccuaga

SEQ ID NO: 5058 - RNA, 19 nt, Artificial Sequence
  Description of Artificial Sequence: Synthetic oligonucleotide
ggggaacagaucauccuag

SEQ ID NO: 5059 - RNA, 19 nt, Artificial Sequence
  Description of Artificial Sequence: Synthetic oligonucleotide
gggggaacagaucauccua

SEQ ID NO: 5060 - RNA, 19 nt, Artificial Sequence
  Description of Artificial Sequence: Synthetic oligonucleotide
agggggaacagaucauccu

SEQ ID NO: 5061 - RNA, 19 nt, Artificial Sequence
  Description of Artificial Sequence: Synthetic oligonucleotide
gagggggaacagaucaucc

SEQ ID NO: 5062 - RNA, 19 nt, Artificial Sequence
  Description of Artificial Sequence: Synthetic oligonucleotide
agagggggaacagaucauc

SEQ ID NO: 5063 - RNA, 19 nt, Artificial Sequence
  Description of Artificial Sequence: Synthetic oligonucleotide
cagagggggaacagaucau

SEQ ID NO: 5064 - RNA, 19 nt, Artificial Sequence
  Description of Artificial Sequence: Synthetic oligonucleotide
ucagagggggaacagauca

SEQ ID NO: 5065 - RNA, 19 nt, Artificial Sequence
  Description of Artificial Sequence: Synthetic oligonucleotide
aucagagggggaacagauc

SEQ ID NO: 5066 - RNA, 19 nt, Artificial Sequence
  Description of Artificial Sequence: Synthetic oligonucleotide
caucagagggggaacagau

SEQ ID NO: 5067 - RNA, 19 nt, Artificial Sequence
  Description of Artificial Sequence: Synthetic oligonucleotide
ucaucagagggggaacaga

SEQ ID NO: 5068 - RNA, 19 nt, Artificial Sequence
  Description of Artificial Sequence: Synthetic oligonucleotide
uucaucagagggggaacag

SEQ ID NO: 5069 - RNA, 19 nt, Artificial Sequence
  Description of Artificial Sequence: Synthetic oligonucleotide
guucaucagagggggaaca

SEQ ID NO: 5070 - RNA, 19 nt, Artificial Sequence
  Description of Artificial Sequence: Synthetic oligonucleotide
uguucaucagagggggaac

SEQ ID NO: 5071 - RNA, 19 nt, Artificial Sequence
  Description of Artificial Sequence: Synthetic oligonucleotide
auguucaucagagggggaa

SEQ ID NO: 5072 - RNA, 19 nt, Artificial Sequence
  Description of Artificial Sequence: Synthetic oligonucleotide
gauguucaucagaggggga

SEQ ID NO: 5073 - RNA, 19 nt, Artificial Sequence
  Description of Artificial Sequence: Synthetic oligonucleotide
ggauguucaucagaggggg

SEQ ID NO: 5074 - RNA, 19 nt, Artificial Sequence
  Description of Artificial Sequence: Synthetic oligonucleotide
aggauguucaucagagggg

SEQ ID NO: 5075 - RNA, 19 nt, Artificial Sequence
  Description of Artificial Sequence: Synthetic oligonucleotide
gaggauguucaucagaggg

SEQ ID NO: 5076 - RNA, 19 nt, Artificial Sequence
  Description of Artificial Sequence: Synthetic oligonucleotide
agaggauguucaucagagg

SEQ ID NO: 5077 - RNA, 19 nt, Artificial Sequence
  Description of Artificial Sequence: Synthetic oligonucleotide
cagaggauguucaucagag

SEQ ID NO: 5078 - RNA, 19 nt, Artificial Sequence
  Description of Artificial Sequence: Synthetic oligonucleotide
ucagaggauguucaucaga

SEQ ID NO: 5079 - RNA, 19 nt, Artificial Sequence
  Description of Artificial Sequence: Synthetic oligonucleotide
aucagaggauguucaucag

SEQ ID NO: 5080 - RNA, 19 nt, Artificial Sequence
  Description of Artificial Sequence: Synthetic oligonucleotide
caucagaggauguucauca

SEQ ID NO: 5081 - RNA, 19 nt, Artificial Sequence
  Description of Artificial Sequence: Synthetic oligonucleotide
ucaucagaggauguucauc

SEQ ID NO: 5082 - RNA, 19 nt, Artificial Sequence
  Description of Artificial Sequence: Synthetic oligonucleotide
aucaucagaggauguucau

SEQ ID NO: 5083 - RNA, 19 nt, Artificial Sequence
  Description of Artificial Sequence: Synthetic oligonucleotide
gaucaucagaggauguuca

SEQ ID NO: 5084 - RNA, 19 nt, Artificial Sequence
  Description of Artificial Sequence: Synthetic oligonucleotide
agaucaucagaggauguuc

SEQ ID NO: 5085 - RNA, 19 nt, Artificial Sequence
  Description of Artificial Sequence: Synthetic oligonucleotide
uagaucaucagaggauguu

SEQ ID NO: 5086 - RNA, 19 nt, Artificial Sequence
  Description of Artificial Sequence: Synthetic oligonucleotide
cuagaucaucagaggaugu

SEQ ID NO: 5087 - RNA, 19 nt, Artificial Sequence
  Description of Artificial Sequence: Synthetic oligonucleotide
ccuagaucaucagaggaug

SEQ ID NO: 5088 - RNA, 19 nt, Artificial Sequence
  Description of Artificial Sequence: Synthetic oligonucleotide
gccuagaucaucagaggau

SEQ ID NO: 5089 - RNA, 19 nt, Artificial Sequence
  Description of Artificial Sequence: Synthetic oligonucleotide
agccuagaucaucagagga

SEQ ID NO: 5090 - RNA, 19 nt, Artificial Sequence
  Description of Artificial Sequence: Synthetic oligonucleotide
gagccuagaucaucagagg

SEQ ID NO: 5091 - RNA, 19 nt, Artificial Sequence
  Description of Artificial Sequence: Synthetic oligonucleotide
ggagccuagaucaucagag

SEQ ID NO: 5092 - RNA, 19 nt, Artificial Sequence
  Description of Artificial Sequence: Synthetic oligonucleotide
gggagccuagaucaucaga

SEQ ID NO: 5093 - RNA, 19 nt, Artificial Sequence
  Description of Artificial Sequence: Synthetic oligonucleotide
ugggagccuagaucaucag

SEQ ID NO: 5094 - RNA, 19 nt, Artificial Sequence
  Description of Artificial Sequence: Synthetic oligonucleotide
cugggagccuagaucauca

SEQ ID NO: 5095 - RNA, 19 nt, Artificial Sequence
  Description of Artificial Sequence: Synthetic oligonucleotide
gcugggagccuagaucauc

SEQ ID NO: 5096 - RNA, 19 nt, Artificial Sequence
  Description of Artificial Sequence: Synthetic oligonucleotide
ugcugggagccuagaucau

SEQ ID NO: 5097 - RNA, 19 nt, Artificial Sequence
  Description of Artificial Sequence: Synthetic oligonucleotide
cugcugggagccuagauca

SEQ ID NO: 5098 - RNA, 19 nt, Artificial Sequence
  Description of Artificial Sequence: Synthetic oligonucleotide
ccugcugggagccuagauc

SEQ ID NO: 5099 - RNA, 19 nt, Artificial Sequence
  Description of Artificial Sequence: Synthetic oligonucleotide
gccugcugggagccuagau

SEQ ID NO: 5100 - RNA, 19 nt, Artificial Sequence
  Description of Artificial Sequence: Synthetic oligonucleotide
agccugcugggagccuaga

SEQ ID NO: 5101 - RNA, 19 nt, Artificial Sequence
  Description of Artificial Sequence: Synthetic oligonucleotide
uagccugcugggagccuag

SEQ ID NO: 5102 - RNA, 19 nt, Artificial Sequence
  Description of Artificial Sequence: Synthetic oligonucleotide
guagccugcugggagccua

SEQ ID NO: 5103 - RNA, 19 nt, Artificial Sequence
  Description of Artificial Sequence: Synthetic oligonucleotide
aguagccugcugggagccu

SEQ ID NO: 5104 - RNA, 19 nt, Artificial Sequence
  Description of Artificial Sequence: Synthetic oligonucleotide
aaguagccugcugggagcc

SEQ ID NO: 5105 - RNA, 19 nt, Artificial Sequence
  Description of Artificial Sequence: Synthetic oligonucleotide
aaaguagccugcugggagc

SEQ ID NO: 5106 - RNA, 19 nt, Artificial Sequence
  Description of Artificial Sequence: Synthetic oligonucleotide
caaaguagccugcugggag

SEQ ID NO: 5107 - RNA, 19 nt, Artificial Sequence
  Description of Artificial Sequence: Synthetic oligonucleotide
ucaaaguagccugcuggga

SEQ ID NO: 5108 - RNA, 19 nt, Artificial Sequence
  Description of Artificial Sequence: Synthetic oligonucleotide
uucaaaguagccugcuggg

SEQ ID NO: 5109 - RNA, 19 nt, Artificial Sequence
  Description of Artificial Sequence: Synthetic oligonucleotide
cuucaaaguagccugcugg

SEQ ID NO: 5110 - RNA, 19 nt, Artificial Sequence
  Description of Artificial Sequence: Synthetic oligonucleotide
ccuucaaaguagccugcug

SEQ ID NO: 5111 - RNA, 19 nt, Artificial Sequence
  Description of Artificial Sequence: Synthetic oligonucleotide
cccuucaaaguagccugcu

SEQ ID NO: 5112 - RNA, 19 nt, Artificial Sequence
  Description of Artificial Sequence: Synthetic oligonucleotide
ucccuucaaaguagccugc

SEQ ID NO: 5113 - RNA, 19 nt, Artificial Sequence
  Description of Artificial Sequence: Synthetic oligonucleotide
uucccuucaaaguagccug

SEQ ID NO: 5114 - RNA, 19 nt, Artificial Sequence
  Description of Artificial Sequence: Synthetic oligonucleotide
guucccuucaaaguagccu

SEQ ID NO: 5115 - RNA, 19 nt, Artificial Sequence
  Description of Artificial Sequence: Synthetic oligonucleotide
uguucccuucaaaguagcc

SEQ ID NO: 5116 - RNA, 19 nt, Artificial Sequence
  Description of Artificial Sequence: Synthetic oligonucleotide
uuguucccuucaaaguagc

SEQ ID NO: 5117 - RNA, 19 nt, Artificial Sequence
  Description of Artificial Sequence: Synthetic oligonucleotide
auuguucccuucaaaguag

SEQ ID NO: 5118 - RNA, 19 nt, Artificial Sequence
  Description of Artificial Sequence: Synthetic oligonucleotide
gauuguucccuucaaagua

SEQ ID NO: 5119 - RNA, 19 nt, Artificial Sequence
  Description of Artificial Sequence: Synthetic oligonucleotide
ugauuguucccuucaaagu

SEQ ID NO: 5120 - RNA, 19 nt, Artificial Sequence
  Description of Artificial Sequence: Synthetic oligonucleotide
cugauuguucccuucaaag

SEQ ID NO: 5121 - RNA, 19 nt, Artificial Sequence
  Description of Artificial Sequence: Synthetic oligonucleotide
ucugauuguucccuucaaa

SEQ ID NO: 5122 - RNA, 19 nt, Artificial Sequence
  Description of Artificial Sequence: Synthetic oligonucleotide
aucugauuguucccuucaa

SEQ ID NO: 5123 - RNA, 19 nt, Artificial Sequence
  Description of Artificial Sequence: Synthetic oligonucleotide
caucugauuguucccuuca

SEQ ID NO: 5124 - RNA, 19 nt, Artificial Sequence
  Description of Artificial Sequence: Synthetic oligonucleotide
gcaucugauuguucccuuc

SEQ ID NO: 5125 - RNA, 19 nt, Artificial Sequence
  Description of Artificial Sequence: Synthetic oligonucleotide
ugcaucugauuguucccuu

SEQ ID NO: 5126 - RNA, 19 nt, Artificial Sequence
  Description of Artificial Sequence: Synthetic oligonucleotide
uugcaucugauuguucccu

SEQ ID NO: 5127 - RNA, 19 nt, Artificial Sequence
  Description of Artificial Sequence: Synthetic oligonucleotide
uuugcaucugauuguuccc

SEQ ID NO: 5128 - RNA, 19 nt, Artificial Sequence
  Description of Artificial Sequence: Synthetic oligonucleotide
uuuugcaucugauuguucc

SEQ ID NO: 5129 - RNA, 19 nt, Artificial Sequence
  Description of Artificial Sequence: Synthetic oligonucleotide
cuuuugcaucugauuguuc

SEQ ID NO: 5130 - RNA, 19 nt, Artificial Sequence
  Description of Artificial Sequence: Synthetic oligonucleotide
gcuuuugcaucugauuguu

SEQ ID NO: 5131 - RNA, 19 nt, Artificial Sequence
  Description of Artificial Sequence: Synthetic oligonucleotide
agcuuuugcaucugauugu

SEQ ID NO: 5132 - RNA, 19 nt, Artificial Sequence
  Description of Artificial Sequence: Synthetic oligonucleotide
gagcuuuugcaucugauug

SEQ ID NO: 5133 - RNA, 19 nt, Artificial Sequence
  Description of Artificial Sequence: Synthetic oligonucleotide
agagcuuuugcaucugauu

SEQ ID NO: 5134 - RNA, 19 nt, Artificial Sequence
  Description of Artificial Sequence: Synthetic oligonucleotide
aagagcuuuugcaucugau

SEQ ID NO: 5135 - RNA, 19 nt, Artificial Sequence
  Description of Artificial Sequence: Synthetic oligonucleotide
caagagcuuuugcaucuga

SEQ ID NO: 5136 - RNA, 19 nt, Artificial Sequence
  Description of Artificial Sequence: Synthetic oligonucleotide
ccaagagcuuuugcaucug

SEQ ID NO: 5137 - RNA, 19 nt, Artificial Sequence
  Description of Artificial Sequence: Synthetic oligonucleotide
cccaagagcuuuugcaucu

SEQ ID NO: 5138 - RNA, 19 nt, Artificial Sequence
  Description of Artificial Sequence: Synthetic oligonucleotide
acccaagagcuuuugcauc

SEQ ID NO: 5139 - RNA, 19 nt, Artificial Sequence
  Description of Artificial Sequence: Synthetic oligonucleotide
cacccaagagcuuuugcau

SEQ ID NO: 5140 - RNA, 19 nt, Artificial Sequence
  Description of Artificial Sequence: Synthetic oligonucleotide
acacccaagagcuuuugca

SEQ ID NO: 5141 - RNA, 19 nt, Artificial Sequence
  Description of Artificial Sequence: Synthetic oligonucleotide
aacacccaagagcuuuugc

SEQ ID NO: 5142 - RNA, 19 nt, Artificial Sequence
  Description of Artificial Sequence: Synthetic oligonucleotide
aaacacccaagagcuuuug

SEQ ID NO: 5143 - RNA, 19 nt, Artificial Sequence
  Description of Artificial Sequence: Synthetic oligonucleotide
uaaacacccaagagcuuuu

SEQ ID NO: 5144 - RNA, 19 nt, Artificial Sequence
  Description of Artificial Sequence: Synthetic oligonucleotide
auaaacacccaagagcuuu

SEQ ID NO: 5145 - RNA, 19 nt, Artificial Sequence
  Description of Artificial Sequence: Synthetic oligonucleotide
aauaaacacccaagagcuu

SEQ ID NO: 5146 - RNA, 19 nt, Artificial Sequence
  Description of Artificial Sequence: Synthetic oligonucleotide
aaauaaacacccaagagcu

SEQ ID NO: 5147 - RNA, 19 nt, Artificial Sequence
  Description of Artificial Sequence: Synthetic oligonucleotide
uaaauaaacacccaagagc

SEQ ID NO: 5148 - RNA, 19 nt, Artificial Sequence
  Description of Artificial Sequence: Synthetic oligonucleotide
uuaaauaaacacccaagag

SEQ ID NO: 5149 - RNA, 19 nt, Artificial Sequence
  Description of Artificial Sequence: Synthetic oligonucleotide
uuuaaauaaacacccaaga

SEQ ID NO: 5150 - RNA, 19 nt, Artificial Sequence
  Description of Artificial Sequence: Synthetic oligonucleotide
uuuuaaauaaacacccaag

SEQ ID NO: 5151 - RNA, 19 nt, Artificial Sequence
  Description of Artificial Sequence: Synthetic oligonucleotide
auuuuaaauaaacacccaa

SEQ ID NO: 5152 - RNA, 19 nt, Artificial Sequence
  Description of Artificial Sequence: Synthetic oligonucleotide
uauuuuaaauaaacaccca

SEQ ID NO: 5153 - RNA, 19 nt, Artificial Sequence
  Description of Artificial Sequence: Synthetic oligonucleotide
guauuuuaaauaaacaccc

SEQ ID NO: 5154 - RNA, 19 nt, Artificial Sequence
  Description of Artificial Sequence: Synthetic oligonucleotide
aguauuuuaaauaaacacc

SEQ ID NO: 5155 - RNA, 19 nt, Artificial Sequence
  Description of Artificial Sequence: Synthetic oligonucleotide
uaguauuuuaaauaaacac

SEQ ID NO: 5156 - RNA, 19 nt, Artificial Sequence
  Description of Artificial Sequence: Synthetic oligonucleotide
cuaguauuuuaaauaaaca

SEQ ID NO: 5157 - RNA, 19 nt, Artificial Sequence
  Description of Artificial Sequence: Synthetic oligonucleotide
acuaguauuuuaaauaaac

SEQ ID NO: 5158 - RNA, 19 nt, Artificial Sequence
  Description of Artificial Sequence: Synthetic oligonucleotide
cacuaguauuuuaaauaaa

SEQ ID NO: 5159 - RNA, 19 nt, Artificial Sequence
  Description of Artificial Sequence: Synthetic oligonucleotide
acacuaguauuuuaaauaa

SEQ ID NO: 5160 - RNA, 19 nt, Artificial Sequence
  Description of Artificial Sequence: Synthetic oligonucleotide
gacacuaguauuuuaaaua

SEQ ID NO: 5161 - RNA, 19 nt, Artificial Sequence
  Description of Artificial Sequence: Synthetic oligonucleotide
ugacacuaguauuuuaaau

SEQ ID NO: 5162 - RNA, 19 nt, Artificial Sequence
  Description of Artificial Sequence: Synthetic oligonucleotide
gugacacuaguauuuuaaa

SEQ ID NO: 5163 - RNA, 19 nt, Artificial Sequence
  Description of Artificial Sequence: Synthetic oligonucleotide
agugacacuaguauuuuaa

SEQ ID NO: 5164 - RNA, 19 nt, Artificial Sequence
  Description of Artificial Sequence: Synthetic oligonucleotide
aagugacacuaguauuuua

SEQ ID NO: 5165 - RNA, 19 nt, Artificial Sequence
  Description of Artificial Sequence: Synthetic oligonucleotide
aaagugacacuaguauuuu

SEQ ID NO: 5166 - RNA, 19 nt, Artificial Sequence
  Description of Artificial Sequence: Synthetic oligonucleotide
gaaagugacacuaguauuu

SEQ ID NO: 5167 - RNA, 19 nt, Artificial Sequence
  Description of Artificial Sequence: Synthetic oligonucleotide
agaaagugacacuaguauu

SEQ ID NO: 5168 - RNA, 19 nt, Artificial Sequence
  Description of Artificial Sequence: Synthetic oligonucleotide
cagaaagugacacuaguau

SEQ ID NO: 5169 - RNA, 19 nt, Artificial Sequence
  Description of Artificial Sequence: Synthetic oligonucleotide
ucagaaagugacacuagua

SEQ ID NO: 5170 - RNA, 19 nt, Artificial Sequence
  Description of Artificial Sequence: Synthetic oligonucleotide
cucagaaagugacacuagu

SEQ ID NO: 5171 - RNA, 19 nt, Artificial Sequence
  Description of Artificial Sequence: Synthetic oligonucleotide
acucagaaagugacacuag

SEQ ID NO: 5172 - RNA, 19 nt, Artificial Sequence
  Description of Artificial Sequence: Synthetic oligonucleotide
uacucagaaagugacacua

SEQ ID NO: 5173 - RNA, 19 nt, Artificial Sequence
  Description of Artificial Sequence: Synthetic oligonucleotide
guacucagaaagugacacu

SEQ ID NO: 5174 - RNA, 19 nt, Artificial Sequence
  Description of Artificial Sequence: Synthetic oligonucleotide
gguacucagaaagugacac

SEQ ID NO: 5175 - RNA, 19 nt, Artificial Sequence
  Description of Artificial Sequence: Synthetic oligonucleotide
ggguacucagaaagugaca

SEQ ID NO: 5176 - RNA, 19 nt, Artificial Sequence
  Description of Artificial Sequence: Synthetic oligonucleotide
cggguacucagaaagugac

SEQ ID NO: 5177 - RNA, 19 nt, Artificial Sequence
  Description of Artificial Sequence: Synthetic oligonucleotide
gcggguacucagaaaguga

SEQ ID NO: 5178 - RNA, 19 nt, Artificial Sequence
  Description of Artificial Sequence: Synthetic oligonucleotide
ggcggguacucagaaagug

SEQ ID NO: 5179 - RNA, 19 nt, Artificial Sequence
  Description of Artificial Sequence: Synthetic oligonucleotide
cggcggguacucagaaagu

SEQ ID NO: 5180 - RNA, 19 nt, Artificial Sequence
  Description of Artificial Sequence: Synthetic oligonucleotide
gcggcggguacucagaaag

SEQ ID NO: 5181 - RNA, 19 nt, Artificial Sequence
  Description of Artificial Sequence: Synthetic oligonucleotide
agcggcggguacucagaaa

SEQ ID NO: 5182 - RNA, 19 nt, Artificial Sequence
  Description of Artificial Sequence: Synthetic oligonucleotide
aagcggcggguacucagaa

SEQ ID NO: 5183 - RNA, 19 nt, Artificial Sequence
  Description of Artificial Sequence: Synthetic oligonucleotide
gaagcggcggguacucaga

SEQ ID NO: 5184 - RNA, 19 nt, Artificial Sequence
  Description of Artificial Sequence: Synthetic oligonucleotide
ugaagcggcggguacucag

SEQ ID NO: 5185 - RNA, 19 nt, Artificial Sequence
  Description of Artificial Sequence: Synthetic oligonucleotide
gugaagcggcggguacuca

SEQ ID NO: 5186 - RNA, 19 nt, Artificial Sequence
  Description of Artificial Sequence: Synthetic oligonucleotide
ugugaagcggcggguacuc

SEQ ID NO: 5187 - RNA, 19 nt, Artificial Sequence
  Description of Artificial Sequence: Synthetic oligonucleotide
cugugaagcggcggguacu

SEQ ID NO: 5188 - RNA, 19 nt, Artificial Sequence
  Description of Artificial Sequence: Synthetic oligonucleotide
ccugugaagcggcggguac

SEQ ID NO: 5189 - RNA, 19 nt, Artificial Sequence
  Description of Artificial Sequence: Synthetic oligonucleotide
gccugugaagcggcgggua

SEQ ID NO: 5190 - RNA, 19 nt, Artificial Sequence
  Description of Artificial Sequence: Synthetic oligonucleotide
agccugugaagcggcgggu

SEQ ID NO: 5191 - RNA, 19 nt, Artificial Sequence
  Description of Artificial Sequence: Synthetic oligonucleotide
cagccugugaagcggcggg

SEQ ID NO: 5192 - RNA, 19 nt, Artificial Sequence
  Description of Artificial Sequence: Synthetic oligonucleotide
ucagccugugaagcggcgg

SEQ ID NO: 5193 - RNA, 19 nt, Artificial Sequence
  Description of Artificial Sequence: Synthetic oligonucleotide
cucagccugugaagcggcg

SEQ ID NO: 5194 - RNA, 19 nt, Artificial Sequence
  Description of Artificial Sequence: Synthetic oligonucleotide
acucagccugugaagcggc

SEQ ID NO: 5195 - RNA, 19 nt, Artificial Sequence
  Description of Artificial Sequence: Synthetic oligonucleotide
gacucagccugugaagcgg

SEQ ID NO: 5196 - RNA, 19 nt, Artificial Sequence
  Description of Artificial Sequence: Synthetic oligonucleotide
ggacucagccugugaagcg

SEQ ID NO: 5197 - RNA, 19 nt, Artificial Sequence
  Description of Artificial Sequence: Synthetic oligonucleotide
uggacucagccugugaagc

SEQ ID NO: 5198 - RNA, 19 nt, Artificial Sequence
  Description of Artificial Sequence: Synthetic oligonucleotide
cuggacucagccugugaag

SEQ ID NO: 5199 - RNA, 19 nt, Artificial Sequence
  Description of Artificial Sequence: Synthetic oligonucleotide
ccuggacucagccugugaa

SEQ ID NO: 5200 - RNA, 19 nt, Artificial Sequence
  Description of Artificial Sequence: Synthetic oligonucleotide
gccuggacucagccuguga

SEQ ID NO: 5201 - RNA, 19 nt, Artificial Sequence
  Description of Artificial Sequence: Synthetic oligonucleotide
ggccuggacucagccugug

SEQ ID NO: 5202 - RNA, 19 nt, Artificial Sequence
  Description of Artificial Sequence: Synthetic oligonucleotide
aggccuggacucagccugu

SEQ ID NO: 5203 - RNA, 19 nt, Artificial Sequence
  Description of Artificial Sequence: Synthetic oligonucleotide
caggccuggacucagccug

SEQ ID NO: 5204 - RNA, 19 nt, Artificial Sequence
  Description of Artificial Sequence: Synthetic oligonucleotide
acaggccuggacucagccu

SEQ ID NO: 5205 - RNA, 19 nt, Artificial Sequence
  Description of Artificial Sequence: Synthetic oligonucleotide
cacaggccuggacucagcc

SEQ ID NO: 5206 - RNA, 19 nt, Artificial Sequence
  Description of Artificial Sequence: Synthetic oligonucleotide
acacaggccuggacucagc

SEQ ID NO: 5207 - RNA, 19 nt, Artificial Sequence
  Description of Artificial Sequence: Synthetic oligonucleotide
cacacaggccuggacucag

SEQ ID NO: 5208 - RNA, 19 nt, Artificial Sequence
  Description of Artificial Sequence: Synthetic oligonucleotide
gcacacaggccuggacuca

SEQ ID NO: 5209 - RNA, 19 nt, Artificial Sequence
  Description of Artificial Sequence: Synthetic oligonucleotide
agcacacaggccuggacuc

SEQ ID NO: 5210 - RNA, 19 nt, Artificial Sequence
  Description of Artificial Sequence: Synthetic oligonucleotide
aagcacacaggccuggacu

SEQ ID NO: 5211 - RNA, 19 nt, Artificial Sequence
  Description of Artificial Sequence: Synthetic oligonucleotide
aaagcacacaggccuggac

SEQ ID NO: 5212 - RNA, 19 nt, Artificial Sequence
  Description of Artificial Sequence: Synthetic oligonucleotide
caaagcacacaggccugga

SEQ ID NO: 5213 - RNA, 19 nt, Artificial Sequence
  Description of Artificial Sequence: Synthetic oligonucleotide
acaaagcacacaggccugg

SEQ ID NO: 5214 - RNA, 19 nt, Artificial Sequence
  Description of Artificial Sequence: Synthetic oligonucleotide
uacaaagcacacaggccug

SEQ ID NO: 5215 - RNA, 19 nt, Artificial Sequence
  Description of Artificial Sequence: Synthetic oligonucleotide
cuacaaagcacacaggccu

SEQ ID NO: 5216 - RNA, 19 nt, Artificial Sequence
  Description of Artificial Sequence: Synthetic oligonucleotide
ucuacaaagcacacaggcc

SEQ ID NO: 5217 - RNA, 19 nt, Artificial Sequence
  Description of Artificial Sequence: Synthetic oligonucleotide
cucuacaaagcacacaggc

SEQ ID NO: 5218 - RNA, 19 nt, Artificial Sequence
  Description of Artificial Sequence: Synthetic oligonucleotide
gcucuacaaagcacacagg

SEQ ID NO: 5219 - RNA, 19 nt, Artificial Sequence
  Description of Artificial Sequence: Synthetic oligonucleotide
ggcucuacaaagcacacag

SEQ ID NO: 5220 - RNA, 19 nt, Artificial Sequence
  Description of Artificial Sequence: Synthetic oligonucleotide
uggcucuacaaagcacaca

SEQ ID NO: 5221 - RNA, 19 nt, Artificial Sequence
  Description of Artificial Sequence: Synthetic oligonucleotide
cuggcucuacaaagcacac

SEQ ID NO: 5222 - RNA, 19 nt, Artificial Sequence
  Description of Artificial Sequence: Synthetic oligonucleotide
gcuggcucuacaaagcaca

SEQ ID NO: 5223 - RNA, 19 nt, Artificial Sequence
  Description of Artificial Sequence: Synthetic oligonucleotide
agcuggcucuacaaagcac

SEQ ID NO: 5224 - RNA, 19 nt, Artificial Sequence
  Description of Artificial Sequence: Synthetic oligonucleotide
cagcuggcucuacaaagca

SEQ ID NO: 5225 - RNA, 19 nt, Artificial Sequence
  Description of Artificial Sequence: Synthetic oligonucleotide
gcagcuggcucuacaaagc

SEQ ID NO: 5226 - RNA, 19 nt, Artificial Sequence
  Description of Artificial Sequence: Synthetic oligonucleotide
agcagcuggcucuacaaag

SEQ ID NO: 5227 - RNA, 19 nt, Artificial Sequence
  Description of Artificial Sequence: Synthetic oligonucleotide
aagcagcuggcucuacaaa

SEQ ID NO: 5228 - RNA, 19 nt, Artificial Sequence
  Description of Artificial Sequence: Synthetic oligonucleotide
caagcagcuggcucuacaa

SEQ ID NO: 5229 - RNA, 19 nt, Artificial Sequence
  Description of Artificial Sequence: Synthetic oligonucleotide
gcaagcagcuggcucuaca

SEQ ID NO: 5230 - RNA, 19 nt, Artificial Sequence
  Description of Artificial Sequence: Synthetic oligonucleotide
agcaagcagcuggcucuac

SEQ ID NO: 5231 - RNA, 19 nt, Artificial Sequence
  Description of Artificial Sequence: Synthetic oligonucleotide
gagcaagcagcuggcucua

SEQ ID NO: 5232 - RNA, 19 nt, Artificial Sequence
  Description of Artificial Sequence: Synthetic oligonucleotide
ugagcaagcagcuggcucu

SEQ ID NO: 5233 - RNA, 19 nt, Artificial Sequence
  Description of Artificial Sequence: Synthetic oligonucleotide
gugagcaagcagcuggcuc

SEQ ID NO: 5234 - RNA, 19 nt, Artificial Sequence
  Description of Artificial Sequence: Synthetic oligonucleotide
ugugagcaagcagcuggcu

SEQ ID NO: 5235 - RNA, 19 nt, Artificial Sequence
  Description of Artificial Sequence: Synthetic oligonucleotide
cugugagcaagcagcuggc

SEQ ID NO: 5236 - RNA, 19 nt, Artificial Sequence
  Description of Artificial Sequence: Synthetic oligonucleotide
gcugugagcaagcagcugg

SEQ ID NO: 5237 - RNA, 19 nt, Artificial Sequence
  Description of Artificial Sequence: Synthetic oligonucleotide
ggcugugagcaagcagcug

SEQ ID NO: 5238 - RNA, 19 nt, Artificial Sequence
  Description of Artificial Sequence: Synthetic oligonucleotide
uggcugugagcaagcagcu

SEQ ID NO: 5239 - RNA, 19 nt, Artificial Sequence
  Description of Artificial Sequence: Synthetic oligonucleotide
guggcugugagcaagcagc

SEQ ID NO: 5240 - RNA, 19 nt, Artificial Sequence
  Description of Artificial Sequence: Synthetic oligonucleotide
uguggcugugagcaagcag

SEQ ID NO: 5241 - RNA, 19 nt, Artificial Sequence
  Description of Artificial Sequence: Synthetic oligonucleotide
auguggcugugagcaagca

SEQ ID NO: 5242 - RNA, 19 nt, Artificial Sequence
  Description of Artificial Sequence: Synthetic oligonucleotide
aauguggcugugagcaagc

SEQ ID NO: 5243 - RNA, 19 nt, Artificial Sequence
  Description of Artificial Sequence: Synthetic oligonucleotide
aaauguggcugugagcaag

SEQ ID NO: 5244 - RNA, 19 nt, Artificial Sequence
  Description of Artificial Sequence: Synthetic oligonucleotide
gaaauguggcugugagcaa

SEQ ID NO: 5245 - RNA, 19 nt, Artificial Sequence
  Description of Artificial Sequence: Synthetic oligonucleotide
ggaaauguggcugugagca

SEQ ID NO: 5246 - RNA, 19 nt, Artificial Sequence
  Description of Artificial Sequence: Synthetic oligonucleotide
uggaaauguggcugugagc

SEQ ID NO: 5247 - RNA, 19 nt, Artificial Sequence
  Description of Artificial Sequence: Synthetic oligonucleotide
auggaaauguggcugugag

SEQ ID NO: 5248 - RNA, 19 nt, Artificial Sequence
  Description of Artificial Sequence: Synthetic oligonucleotide
aauggaaauguggcuguga

SEQ ID NO: 5249 - RNA, 19 nt, Artificial Sequence
  Description of Artificial Sequence: Synthetic oligonucleotide
aaauggaaauguggcugug

SEQ ID NO: 5250 - RNA, 19 nt, Artificial Sequence
  Description of Artificial Sequence: Synthetic oligonucleotide
caaauggaaauguggcugu

SEQ ID NO: 5251 - RNA, 19 nt, Artificial Sequence
  Description of Artificial Sequence: Synthetic oligonucleotide
gcaaauggaaauguggcug

SEQ ID NO: 5252 - RNA, 19 nt, Artificial Sequence
  Description of Artificial Sequence: Synthetic oligonucleotide
ugcaaauggaaauguggcu

SEQ ID NO: 5253 - RNA, 19 nt, Artificial Sequence
  Description of Artificial Sequence: Synthetic oligonucleotide
augcaaauggaaauguggc

SEQ ID NO: 5254 - RNA, 19 nt, Artificial Sequence
  Description of Artificial Sequence: Synthetic oligonucleotide
gaugcaaauggaaaugugg

SEQ ID NO: 5255 - RNA, 19 nt, Artificial Sequence
  Description of Artificial Sequence: Synthetic oligonucleotide
ugaugcaaauggaaaugug

SEQ ID NO: 5256 - RNA, 19 nt, Artificial Sequence
  Description of Artificial Sequence: Synthetic oligonucleotide
augaugcaaauggaaaugu

SEQ ID NO: 5257 - RNA, 19 nt, Artificial Sequence
  Description of Artificial Sequence: Synthetic oligonucleotide
aaugaugcaaauggaaaug

SEQ ID NO: 5258 - RNA, 19 nt, Artificial Sequence
  Description of Artificial Sequence: Synthetic oligonucleotide
uaaugaugcaaauggaaau

SEQ ID NO: 5259 - RNA, 19 nt, Artificial Sequence
  Description of Artificial Sequence: Synthetic oligonucleotide
guaaugaugcaaauggaaa

SEQ ID NO: 5260 - RNA, 19 nt, Artificial Sequence
  Description of Artificial Sequence: Synthetic oligonucleotide
aguaaugaugcaaauggaa

SEQ ID NO: 5261 - RNA, 19 nt, Artificial Sequence
  Description of Artificial Sequence: Synthetic oligonucleotide
caguaaugaugcaaaugga

SEQ ID NO: 5262 - RNA, 19 nt, Artificial Sequence
  Description of Artificial Sequence: Synthetic oligonucleotide
gcaguaaugaugcaaaugg

SEQ ID NO: 5263 - RNA, 19 nt, Artificial Sequence
  Description of Artificial Sequence: Synthetic oligonucleotide
ggcaguaaugaugcaaaug

SEQ ID NO: 5264 - RNA, 19 nt, Artificial Sequence
  Description of Artificial Sequence: Synthetic oligonucleotide
aggcaguaaugaugcaaau

SEQ ID NO: 5265 - RNA, 19 nt, Artificial Sequence
  Description of Artificial Sequence: Synthetic oligonucleotide
aaggcaguaaugaugcaaa

SEQ ID NO: 5266 - RNA, 19 nt, Artificial Sequence
  Description of Artificial Sequence: Synthetic oligonucleotide
gaaggcaguaaugaugcaa

SEQ ID NO: 5267 - RNA, 19 nt, Artificial Sequence
  Description of Artificial Sequence: Synthetic oligonucleotide
ugaaggcaguaaugaugca

SEQ ID NO: 5268 - RNA, 19 nt, Artificial Sequence
  Description of Artificial Sequence: Synthetic oligonucleotide
gugaaggcaguaaugaugc

SEQ ID NO: 5269 - RNA, 19 nt, Artificial Sequence
  Description of Artificial Sequence: Synthetic oligonucleotide
ggugaaggcaguaaugaug

SEQ ID NO: 5270 - RNA, 19 nt, Artificial Sequence
  Description of Artificial Sequence: Synthetic oligonucleotide
aggugaaggcaguaaugau

SEQ ID NO: 5271 - RNA, 19 nt, Artificial Sequence
  Description of Artificial Sequence: Synthetic oligonucleotide
caggugaaggcaguaauga

SEQ ID NO: 5272 - RNA, 19 nt, Artificial Sequence
  Description of Artificial Sequence: Synthetic oligonucleotide
gcaggugaaggcaguaaug

SEQ ID NO: 5273 - RNA, 19 nt, Artificial Sequence
  Description of Artificial Sequence: Synthetic oligonucleotide
ugcaggugaaggcaguaau

SEQ ID NO: 5274 - RNA, 19 nt, Artificial Sequence
  Description of Artificial Sequence: Synthetic oligonucleotide
augcaggugaaggcaguaa

SEQ ID NO: 5275 - RNA, 19 nt, Artificial Sequence
  Description of Artificial Sequence: Synthetic oligonucleotide
uaugcaggugaaggcagua

SEQ ID NO: 5276 - RNA, 19 nt, Artificial Sequence
  Description of Artificial Sequence: Synthetic oligonucleotide
cuaugcaggugaaggcagu

SEQ ID NO: 5277 - RNA, 19 nt, Artificial Sequence
  Description of Artificial Sequence: Synthetic oligonucleotide
acuaugcaggugaaggcag

SEQ ID NO: 5278 - RNA, 19 nt, Artificial Sequence
  Description of Artificial Sequence: Synthetic oligonucleotide
gacuaugcaggugaaggca

SEQ ID NO: 5279 - RNA, 19 nt, Artificial Sequence
  Description of Artificial Sequence: Synthetic oligonucleotide
ugacuaugcaggugaaggc

SEQ ID NO: 5280 - RNA, 19 nt, Artificial Sequence
  Description of Artificial Sequence: Synthetic oligonucleotide
gugacuaugcaggugaagg

SEQ ID NO: 5281 - RNA, 19 nt, Artificial Sequence
  Description of Artificial Sequence: Synthetic oligonucleotide
agugacuaugcaggugaag

SEQ ID NO: 5282 - RNA, 19 nt, Artificial Sequence
  Description of Artificial Sequence: Synthetic oligonucleotide
gagugacuaugcaggugaa

SEQ ID NO: 5283 - RNA, 19 nt, Artificial Sequence
  Description of Artificial Sequence: Synthetic oligonucleotide
agagugacuaugcagguga

SEQ ID NO: 5284 - RNA, 19 nt, Artificial Sequence
  Description of Artificial Sequence: Synthetic oligonucleotide
aagagugacuaugcaggug

SEQ ID NO: 5285 - RNA, 19 nt, Artificial Sequence
  Description of Artificial Sequence: Synthetic oligonucleotide
aaagagugacuaugcaggu

SEQ ID NO: 5286 - RNA, 19 nt, Artificial Sequence
  Description of Artificial Sequence: Synthetic oligonucleotide
aaaagagugacuaugcagg

SEQ ID NO: 5287 - RNA, 19 nt, Artificial Sequence
  Description of Artificial Sequence: Synthetic oligonucleotide
caaaagagugacuaugcag

SEQ ID NO: 5288 - RNA, 19 nt, Artificial Sequence
  Description of Artificial Sequence: Synthetic oligonucleotide
ucaaaagagugacuaugca

SEQ ID NO: 5289 - RNA, 19 nt, Artificial Sequence
  Description of Artificial Sequence: Synthetic oligonucleotide
aucaaaagagugacuaugc

SEQ ID NO: 5290 - RNA, 19 nt, Artificial Sequence
  Description of Artificial Sequence: Synthetic oligonucleotide
caucaaaagagugacuaug

SEQ ID NO: 5291 - RNA, 19 nt, Artificial Sequence
  Description of Artificial Sequence: Synthetic oligonucleotide
gcaucaaaagagugacuau

SEQ ID NO: 5292 - RNA, 19 nt, Artificial Sequence
  Description of Artificial Sequence: Synthetic oligonucleotide
agcaucaaaagagugacua

SEQ ID NO: 5293 - RNA, 19 nt, Artificial Sequence
  Description of Artificial Sequence: Synthetic oligonucleotide
cagcaucaaaagagugacu

SEQ ID NO: 5294 - RNA, 19 nt, Artificial Sequence
  Description of Artificial Sequence: Synthetic oligonucleotide
ccagcaucaaaagagugac

SEQ ID NO: 5295 - RNA, 19 nt, Artificial Sequence
  Description of Artificial Sequence: Synthetic oligonucleotide
cccagcaucaaaagaguga

SEQ ID NO: 5296 - RNA, 19 nt, Artificial Sequence
  Description of Artificial Sequence: Synthetic oligonucleotide
ccccagcaucaaaagagug

SEQ ID NO: 5297 - RNA, 19 nt, Artificial Sequence
  Description of Artificial Sequence: Synthetic oligonucleotide
uccccagcaucaaaagagu

SEQ ID NO: 5298 - RNA, 19 nt, Artificial Sequence
  Description of Artificial Sequence: Synthetic oligonucleotide
uuccccagcaucaaaagag

SEQ ID NO: 5299 - RNA, 19 nt, Artificial Sequence
  Description of Artificial Sequence: Synthetic oligonucleotide
guuccccagcaucaaaaga

SEQ ID NO: 5300 - RNA, 19 nt, Artificial Sequence
  Description of Artificial Sequence: Synthetic oligonucleotide
gguuccccagcaucaaaag

SEQ ID NO: 5301 - RNA, 19 nt, Artificial Sequence
  Description of Artificial Sequence: Synthetic oligonucleotide
ugguuccccagcaucaaaa

SEQ ID NO: 5302 - RNA, 19 nt, Artificial Sequence
  Description of Artificial Sequence: Synthetic oligonucleotide
uugguuccccagcaucaaa

SEQ ID NO: 5303 - RNA, 19 nt, Artificial Sequence
  Description of Artificial Sequence: Synthetic oligonucleotide
uuugguuccccagcaucaa

SEQ ID NO: 5304 - RNA, 19 nt, Artificial Sequence
  Description of Artificial Sequence: Synthetic oligonucleotide
uuuugguuccccagcauca

SEQ ID NO: 5305 - RNA, 19 nt, Artificial Sequence
  Description of Artificial Sequence: Synthetic oligonucleotide
auuuugguuccccagcauc

SEQ ID NO: 5306 - RNA, 19 nt, Artificial Sequence
  Description of Artificial Sequence: Synthetic oligonucleotide
cauuuugguuccccagcau

SEQ ID NO: 5307 - RNA, 19 nt, Artificial Sequence
  Description of Artificial Sequence: Synthetic oligonucleotide
ccauuuugguuccccagca

SEQ ID NO: 5308 - RNA, 19 nt, Artificial Sequence
  Description of Artificial Sequence: Synthetic oligonucleotide
accauuuugguuccccagc

SEQ ID NO: 5309 - RNA, 19 nt, Artificial Sequence
  Description of Artificial Sequence: Synthetic oligonucleotide
caccauuuugguuccccag

SEQ ID NO: 5310 - RNA, 19 nt, Artificial Sequence
  Description of Artificial Sequence: Synthetic oligonucleotide
ucaccauuuugguucccca

SEQ ID NO: 5311 - RNA, 19 nt, Artificial Sequence
  Description of Artificial Sequence: Synthetic oligonucleotide
aucaccauuuugguucccc

SEQ ID NO: 5312 - RNA, 19 nt, Artificial Sequence
  Description of Artificial Sequence: Synthetic oligonucleotide
caucaccauuuugguuccc

SEQ ID NO: 5313 - RNA, 19 nt, Artificial Sequence
  Description of Artificial Sequence: Synthetic oligonucleotide
ucaucaccauuuugguucc

SEQ ID NO: 5314 - RNA, 19 nt, Artificial Sequence
  Description of Artificial Sequence: Synthetic oligonucleotide
aucaucaccauuuugguuc

SEQ ID NO: 5315 - RNA, 19 nt, Artificial Sequence
  Description of Artificial Sequence: Synthetic oligonucleotide
uaucaucaccauuuugguu

SEQ ID NO: 5316 - RNA, 19 nt, Artificial Sequence
  Description of Artificial Sequence: Synthetic oligonucleotide
auaucaucaccauuuuggu

SEQ ID NO: 5317 - RNA, 19 nt, Artificial Sequence
  Description of Artificial Sequence: Synthetic oligonucleotide
uauaucaucaccauuuugg

SEQ ID NO: 5318 - RNA, 19 nt, Artificial Sequence
  Description of Artificial Sequence: Synthetic oligonucleotide
auauaucaucaccauuuug

SEQ ID NO: 5319 - RNA, 19 nt, Artificial Sequence
  Description of Artificial Sequence: Synthetic oligonucleotide
uauauaucaucaccauuuu

SEQ ID NO: 5320 - RNA, 19 nt, Artificial Sequence
  Description of Artificial Sequence: Synthetic oligonucleotide
cuauauaucaucaccauuu

SEQ ID NO: 5321 - RNA, 19 nt, Artificial Sequence
  Description of Artificial Sequence: Synthetic oligonucleotide
ucuauauaucaucaccauu

SEQ ID NO: 5322 - RNA, 19 nt, Artificial Sequence
  Description of Artificial Sequence: Synthetic oligonucleotide
gucuauauaucaucaccau

SEQ ID NO: 5323 - RNA, 19 nt, Artificial Sequence
  Description of Artificial Sequence: Synthetic oligonucleotide
agucuauauaucaucacca

SEQ ID NO: 5324 - RNA, 19 nt, Artificial Sequence
  Description of Artificial Sequence: Synthetic oligonucleotide
aagucuauauaucaucacc

SEQ ID NO: 5325 - RNA, 19 nt, Artificial Sequence
  Description of Artificial Sequence: Synthetic oligonucleotide
aaagucuauauaucaucac

SEQ ID NO: 5326 - RNA, 19 nt, Artificial Sequence
  Description of Artificial Sequence: Synthetic oligonucleotide
uaaagucuauauaucauca

SEQ ID NO: 5327 - RNA, 19 nt, Artificial Sequence
  Description of Artificial Sequence: Synthetic oligonucleotide
auaaagucuauauaucauc

SEQ ID NO: 5328 - RNA, 19 nt, Artificial Sequence
  Description of Artificial Sequence: Synthetic oligonucleotide
cauaaagucuauauaucau

SEQ ID NO: 5329 - RNA, 19 nt, Artificial Sequence
  Description of Artificial Sequence: Synthetic oligonucleotide
acauaaagucuauauauca

SEQ ID NO: 5330 - RNA, 19 nt, Artificial Sequence
  Description of Artificial Sequence: Synthetic oligonucleotide
uacauaaagucuauauauc

SEQ ID NO: 5331 - RNA, 19 nt, Artificial Sequence
  Description of Artificial Sequence: Synthetic oligonucleotide
auacauaaagucuauauau

SEQ ID NO: 5332 - RNA, 19 nt, Artificial Sequence
  Description of Artificial Sequence: Synthetic oligonucleotide
uauacauaaagucuauaua

SEQ ID NO: 5333 - RNA, 19 nt, Artificial Sequence
  Description of Artificial Sequence: Synthetic oligonucleotide
cuauacauaaagucuauau

SEQ ID NO: 5334 - RNA, 19 nt, Artificial Sequence
  Description of Artificial Sequence: Synthetic oligonucleotide
gcuauacauaaagucuaua

SEQ ID NO: 5335 - RNA, 19 nt, Artificial Sequence
  Description of Artificial Sequence: Synthetic oligonucleotide
ggcuauacauaaagucuau

SEQ ID NO: 5336 - RNA, 19 nt, Artificial Sequence
  Description of Artificial Sequence: Synthetic oligonucleotide
uggcuauacauaaagucua

SEQ ID NO: 5337 - RNA, 19 nt, Artificial Sequence
  Description of Artificial Sequence: Synthetic oligonucleotide
guggcuauacauaaagucu

SEQ ID NO: 5338 - RNA, 19 nt, Artificial Sequence
  Description of Artificial Sequence: Synthetic oligonucleotide
uguggcuauacauaaaguc

SEQ ID NO: 5339 - RNA, 19 nt, Artificial Sequence
  Description of Artificial Sequence: Synthetic oligonucleotide
cuguggcuauacauaaagu

SEQ ID NO: 5340 - RNA, 19 nt, Artificial Sequence
  Description of Artificial Sequence: Synthetic oligonucleotide
acuguggcuauacauaaag

SEQ ID NO: 5341 - RNA, 19 nt, Artificial Sequence
  Description of Artificial Sequence: Synthetic oligonucleotide
aacuguggcuauacauaaa

SEQ ID NO: 5342 - RNA, 19 nt, Artificial Sequence
  Description of Artificial Sequence: Synthetic oligonucleotide
gaacuguggcuauacauaa

SEQ ID NO: 5343 - RNA, 19 nt, Artificial Sequence
  Description of Artificial Sequence: Synthetic oligonucleotide
ugaacuguggcuauacaua

SEQ ID NO: 5344 - RNA, 19 nt, Artificial Sequence
  Description of Artificial Sequence: Synthetic oligonucleotide
augaacuguggcuauacau

SEQ ID NO: 5345 - RNA, 19 nt, Artificial Sequence
  Description of Artificial Sequence: Synthetic oligonucleotide
gaugaacuguggcuauaca

SEQ ID NO: 5346 - RNA, 19 nt, Artificial Sequence
  Description of Artificial Sequence: Synthetic oligonucleotide
ggaugaacuguggcuauac

SEQ ID NO: 5347 - RNA, 19 nt, Artificial Sequence
  Description of Artificial Sequence: Synthetic oligonucleotide
gggaugaacuguggcuaua

SEQ ID NO: 5348 - RNA, 19 nt, Artificial Sequence
  Description of Artificial Sequence: Synthetic oligonucleotide
ggggaugaacuguggcuau

SEQ ID NO: 5349 - RNA, 19 nt, Artificial Sequence
  Description of Artificial Sequence: Synthetic oligonucleotide
uggggaugaacuguggcua

SEQ ID NO: 5350 - RNA, 19 nt, Artificial Sequence
  Description of Artificial Sequence: Synthetic oligonucleotide
uuggggaugaacuguggcu

SEQ ID NO: 5351 - RNA, 19 nt, Artificial Sequence
  Description of Artificial Sequence: Synthetic oligonucleotide
guuggggaugaacuguggc

SEQ ID NO: 5352 - RNA, 19 nt, Artificial Sequence
  Description of Artificial Sequence: Synthetic oligonucleotide
gguuggggaugaacugugg

SEQ ID NO: 5353 - RNA, 19 nt, Artificial Sequence
  Description of Artificial Sequence: Synthetic oligonucleotide
ggguuggggaugaacugug

SEQ ID NO: 5354 - RNA, 19 nt, Artificial Sequence
  Description of Artificial Sequence: Synthetic oligonucleotide
aggguuggggaugaacugu

SEQ ID NO: 5355 - RNA, 19 nt, Artificial Sequence
  Description of Artificial Sequence: Synthetic oligonucleotide
uaggguuggggaugaacug

SEQ ID NO: 5356 - RNA, 19 nt, Artificial Sequence
  Description of Artificial Sequence: Synthetic oligonucleotide
cuaggguuggggaugaacu

SEQ ID NO: 5357 - RNA, 19 nt, Artificial Sequence
  Description of Artificial Sequence: Synthetic oligonucleotide
acuaggguuggggaugaac

SEQ ID NO: 5358 - RNA, 19 nt, Artificial Sequence
  Description of Artificial Sequence: Synthetic oligonucleotide
gacuaggguuggggaugaa

SEQ ID NO: 5359 - RNA, 19 nt, Artificial Sequence
  Description of Artificial Sequence: Synthetic oligonucleotide
agacuaggguuggggauga

SEQ ID NO: 5360 - RNA, 19 nt, Artificial Sequence
  Description of Artificial Sequence: Synthetic oligonucleotide
aagacuaggguuggggaug

SEQ ID NO: 5361 - RNA, 19 nt, Artificial Sequence
  Description of Artificial Sequence: Synthetic oligonucleotide
gaagacuaggguuggggau

SEQ ID NO: 5362 - RNA, 19 nt, Artificial Sequence
  Description of Artificial Sequence: Synthetic oligonucleotide
cgaagacuaggguugggga

SEQ ID NO: 5363 - RNA, 19 nt, Artificial Sequence
  Description of Artificial Sequence: Synthetic oligonucleotide
ucgaagacuaggguugggg

SEQ ID NO: 5364 - RNA, 19 nt, Artificial Sequence
  Description of Artificial Sequence: Synthetic oligonucleotide
uucgaagacuaggguuggg

SEQ ID NO: 5365 - RNA, 19 nt, Artificial Sequence
  Description of Artificial Sequence: Synthetic oligonucleotide
uuucgaagacuaggguugg

SEQ ID NO: 5366 - RNA, 19 nt, Artificial Sequence
  Description of Artificial Sequence: Synthetic oligonucleotide
auuucgaagacuaggguug

SEQ ID NO: 5367 - RNA, 19 nt, Artificial Sequence
  Description of Artificial Sequence: Synthetic oligonucleotide
cauuucgaagacuaggguu

SEQ ID NO: 5368 - RNA, 19 nt, Artificial Sequence
  Description of Artificial Sequence: Synthetic oligonucleotide
acauuucgaagacuagggu

SEQ ID NO: 5369 - RNA, 19 nt, Artificial Sequence
  Description of Artificial Sequence: Synthetic oligonucleotide
aacauuucgaagacuaggg

SEQ ID NO: 5370 - RNA, 19 nt, Artificial Sequence
  Description of Artificial Sequence: Synthetic oligonucleotide
uaacauuucgaagacuagg

SEQ ID NO: 5371 - RNA, 19 nt, Artificial Sequence
  Description of Artificial Sequence: Synthetic oligonucleotide
uuaacauuucgaagacuag

SEQ ID NO: 5372 - RNA, 19 nt, Artificial Sequence
  Description of Artificial Sequence: Synthetic oligonucleotide
auuaacauuucgaagacua

SEQ ID NO: 5373 - RNA, 19 nt, Artificial Sequence
  Description of Artificial Sequence: Synthetic oligonucleotide
uauuaacauuucgaagacu

SEQ ID NO: 5374 - RNA, 19 nt, Artificial Sequence
  Description of Artificial Sequence: Synthetic oligonucleotide
auauuaacauuucgaagac

SEQ ID NO: 5375 - RNA, 19 nt, Artificial Sequence
  Description of Artificial Sequence: Synthetic oligonucleotide
aauauuaacauuucgaaga

SEQ ID NO: 5376 - RNA, 19 nt, Artificial Sequence
  Description of Artificial Sequence: Synthetic oligonucleotide
aaauauuaacauuucgaag

SEQ ID NO: 5377 - RNA, 19 nt, Artificial Sequence
  Description of Artificial Sequence: Synthetic oligonucleotide
caaauauuaacauuucgaa

SEQ ID NO: 5378 - RNA, 19 nt, Artificial Sequence
  Description of Artificial Sequence: Synthetic oligonucleotide
ucaaauauuaacauuucga

SEQ ID NO: 5379 - RNA, 19 nt, Artificial Sequence
  Description of Artificial Sequence: Synthetic oligonucleotide
aucaaauauuaacauuucg

SEQ ID NO: 5380 - RNA, 19 nt, Artificial Sequence
  Description of Artificial Sequence: Synthetic oligonucleotide
uaucaaauauuaacauuuc

SEQ ID NO: 5381 - RNA, 19 nt, Artificial Sequence
  Description of Artificial Sequence: Synthetic oligonucleotide
uuaucaaauauuaacauuu

SEQ ID NO: 5382 - RNA, 19 nt, Artificial Sequence
  Description of Artificial Sequence: Synthetic oligonucleotide
uuuaucaaauauuaacauu

SEQ ID NO: 5383 - RNA, 19 nt, Artificial Sequence
  Description of Artificial Sequence: Synthetic oligonucleotide
auuuaucaaauauuaacau

SEQ ID NO: 5384 - RNA, 19 nt, Artificial Sequence
  Description of Artificial Sequence: Synthetic oligonucleotide
gauuuaucaaauauuaaca

SEQ ID NO: 5385 - RNA, 19 nt, Artificial Sequence
  Description of Artificial Sequence: Synthetic oligonucleotide
agauuuaucaaauauuaac

SEQ ID NO: 5386 - RNA, 19 nt, Artificial Sequence
  Description of Artificial Sequence: Synthetic oligonucleotide
uagauuuaucaaauauuaa

SEQ ID NO: 5387 - RNA, 19 nt, Artificial Sequence
  Description of Artificial Sequence: Synthetic oligonucleotide
cuagauuuaucaaauauua

SEQ ID NO: 5388 - RNA, 19 nt, Artificial Sequence
  Description of Artificial Sequence: Synthetic oligonucleotide
ucuagauuuaucaaauauu

SEQ ID NO: 5389 - RNA, 19 nt, Artificial Sequence
  Description of Artificial Sequence: Synthetic oligonucleotide
uucuagauuuaucaaauau

SEQ ID NO: 5390 - RNA, 19 nt, Artificial Sequence
  Description of Artificial Sequence: Synthetic oligonucleotide
uuucuagauuuaucaaaua

SEQ ID NO: 5391 - RNA, 19 nt, Artificial Sequence
  Description of Artificial Sequence: Synthetic oligonucleotide
uuuucuagauuuaucaaau

SEQ ID NO: 5392 - RNA, 19 nt, Artificial Sequence
  Description of Artificial Sequence: Synthetic oligonucleotide
auuuucuagauuuaucaaa

SEQ ID NO: 5393 - RNA, 19 nt, Artificial Sequence
  Description of Artificial Sequence: Synthetic oligonucleotide
cauuuucuagauuuaucaa

SEQ ID NO: 5394 - RNA, 19 nt, Artificial Sequence
  Description of Artificial Sequence: Synthetic oligonucleotide
gcauuuucuagauuuauca

SEQ ID NO: 5395 - RNA, 19 nt, Artificial Sequence
  Description of Artificial Sequence: Synthetic oligonucleotide
ugcauuuucuagauuuauc

SEQ ID NO: 5396 - RNA, 19 nt, Artificial Sequence
  Description of Artificial Sequence: Synthetic oligonucleotide
augcauuuucuagauuuau

SEQ ID NO: 5397 - RNA, 19 nt, Artificial Sequence
  Description of Artificial Sequence: Synthetic oligonucleotide
aaugcauuuucuagauuua

SEQ ID NO: 5398 - RNA, 19 nt, Artificial Sequence
  Description of Artificial Sequence: Synthetic oligonucleotide
gaaugcauuuucuagauuu

SEQ ID NO: 5399 - RNA, 19 nt, Artificial Sequence
  Description of Artificial Sequence: Synthetic oligonucleotide
ugaaugcauuuucuagauu

SEQ ID NO: 5400 - RNA, 19 nt, Artificial Sequence
  Description of Artificial Sequence: Synthetic oligonucleotide
augaaugcauuuucuagau

SEQ ID NO: 5401 - RNA, 19 nt, Artificial Sequence
  Description of Artificial Sequence: Synthetic oligonucleotide
uaugaaugcauuuucuaga

SEQ ID NO: 5402 - RNA, 19 nt, Artificial Sequence
  Description of Artificial Sequence: Synthetic oligonucleotide
guaugaaugcauuuucuag

SEQ ID NO: 5403 - RNA, 19 nt, Artificial Sequence
  Description of Artificial Sequence: Synthetic oligonucleotide
uguaugaaugcauuuucua

SEQ ID NO: 5404 - RNA, 19 nt, Artificial Sequence
  Description of Artificial Sequence: Synthetic oligonucleotide
uuguaugaaugcauuuucu

SEQ ID NO: 5405 - RNA, 19 nt, Artificial Sequence
  Description of Artificial Sequence: Synthetic oligonucleotide
auuguaugaaugcauuuuc

SEQ ID NO: 5406 - RNA, 19 nt, Artificial Sequence
  Description of Artificial Sequence: Synthetic oligonucleotide
aauuguaugaaugcauuuu

SEQ ID NO: 5407 - RNA, 19 nt, Artificial Sequence
  Description of Artificial Sequence: Synthetic oligonucleotide
uaauuguaugaaugcauuu

SEQ ID NO: 5408 - RNA, 19 nt, Artificial Sequence
  Description of Artificial Sequence: Synthetic oligonucleotide
guaauuguaugaaugcauu

SEQ ID NO: 5409 - RNA, 19 nt, Artificial Sequence
  Description of Artificial Sequence: Synthetic oligonucleotide
uguaauuguaugaaugcau

SEQ ID NO: 5410 - RNA, 19 nt, Artificial Sequence
  Description of Artificial Sequence: Synthetic oligonucleotide
cuguaauuguaugaaugca

SEQ ID NO: 5411 - RNA, 19 nt, Artificial Sequence
  Description of Artificial Sequence: Synthetic oligonucleotide
ucuguaauuguaugaaugc

SEQ ID NO: 5412 - RNA, 19 nt, Artificial Sequence
  Description of Artificial Sequence: Synthetic oligonucleotide
uucuguaauuguaugaaug

SEQ ID NO: 5413 - RNA, 19 nt, Artificial Sequence
  Description of Artificial Sequence: Synthetic oligonucleotide
auucuguaauuguaugaau

SEQ ID NO: 5414 - RNA, 19 nt, Artificial Sequence
  Description of Artificial Sequence: Synthetic oligonucleotide
aauucuguaauuguaugaa

SEQ ID NO: 5415 - RNA, 19 nt, Artificial Sequence
  Description of Artificial Sequence: Synthetic oligonucleotide
gaauucuguaauuguauga

SEQ ID NO: 5416 - RNA, 19 nt, Artificial Sequence
  Description of Artificial Sequence: Synthetic oligonucleotide
ugaauucuguaauuguaug

SEQ ID NO: 5417 - RNA, 19 nt, Artificial Sequence
  Description of Artificial Sequence: Synthetic oligonucleotide
uugaauucuguaauuguau

SEQ ID NO: 5418 - RNA, 19 nt, Artificial Sequence
  Description of Artificial Sequence: Synthetic oligonucleotide
uuugaauucuguaauugua

SEQ ID NO: 5419 - RNA, 19 nt, Artificial Sequence
  Description of Artificial Sequence: Synthetic oligonucleotide
auuugaauucuguaauugu

SEQ ID NO: 5420 - RNA, 19 nt, Artificial Sequence
  Description of Artificial Sequence: Synthetic oligonucleotide
uauuugaauucuguaauug

SEQ ID NO: 5421 - RNA, 19 nt, Artificial Sequence
  Description of Artificial Sequence: Synthetic oligonucleotide
auauuugaauucuguaauu

SEQ ID NO: 5422 - RNA, 19 nt, Artificial Sequence
  Description of Artificial Sequence: Synthetic oligonucleotide
aauauuugaauucuguaau

SEQ ID NO: 5423 - RNA, 19 nt, Artificial Sequence
  Description of Artificial Sequence: Synthetic oligonucleotide
caauauuugaauucuguaa

SEQ ID NO: 5424 - RNA, 19 nt, Artificial Sequence
  Description of Artificial Sequence: Synthetic oligonucleotide
gcaauauuugaauucugua

SEQ ID NO: 5425 - RNA, 19 nt, Artificial Sequence
  Description of Artificial Sequence: Synthetic oligonucleotide
ugcaauauuugaauucugu

SEQ ID NO: 5426 - RNA, 19 nt, Artificial Sequence
  Description of Artificial Sequence: Synthetic oligonucleotide
uugcaauauuugaauucug

SEQ ID NO: 5427 - RNA, 19 nt, Artificial Sequence
  Description of Artificial Sequence: Synthetic oligonucleotide
uuugcaauauuugaauucu

SEQ ID NO: 5428 - RNA, 19 nt, Artificial Sequence
  Description of Artificial Sequence: Synthetic oligonucleotide
uuuugcaauauuugaauuc

SEQ ID NO: 5429 - RNA, 19 nt, Artificial Sequence
  Description of Artificial Sequence: Synthetic oligonucleotide
cuuuugcaauauuugaauu

SEQ ID NO: 5430 - RNA, 19 nt, Artificial Sequence
  Description of Artificial Sequence: Synthetic oligonucleotide
ccuuuugcaauauuugaau

SEQ ID NO: 5431 - RNA, 19 nt, Artificial Sequence
  Description of Artificial Sequence: Synthetic oligonucleotide
uccuuuugcaauauuugaa

SEQ ID NO: 5432 - RNA, 19 nt, Artificial Sequence
  Description of Artificial Sequence: Synthetic oligonucleotide
auccuuuugcaauauuuga

SEQ ID NO: 5433 - RNA, 19 nt, Artificial Sequence
  Description of Artificial Sequence: Synthetic oligonucleotide
cauccuuuugcaauauuug

SEQ ID NO: 5434 - RNA, 19 nt, Artificial Sequence
  Description of Artificial Sequence: Synthetic oligonucleotide
acauccuuuugcaauauuu

SEQ ID NO: 5435 - RNA, 19 nt, Artificial Sequence
  Description of Artificial Sequence: Synthetic oligonucleotide
cacauccuuuugcaauauu

SEQ ID NO: 5436 - RNA, 19 nt, Artificial Sequence
  Description of Artificial Sequence: Synthetic oligonucleotide
acacauccuuuugcaauau

SEQ ID NO: 5437 - RNA, 19 nt, Artificial Sequence
  Description of Artificial Sequence: Synthetic oligonucleotide
cacacauccuuuugcaaua

SEQ ID NO: 5438 - RNA, 19 nt, Artificial Sequence
  Description of Artificial Sequence: Synthetic oligonucleotide
acacacauccuuuugcaau

SEQ ID NO: 5439 - RNA, 19 nt, Artificial Sequence
  Description of Artificial Sequence: Synthetic oligonucleotide
gacacacauccuuuugcaa

SEQ ID NO: 5440 - RNA, 19 nt, Artificial Sequence
  Description of Artificial Sequence: Synthetic oligonucleotide
agacacacauccuuuugca

SEQ ID NO: 5441 - RNA, 19 nt, Artificial Sequence
  Description of Artificial Sequence: Synthetic oligonucleotide
aagacacacauccuuuugc

SEQ ID NO: 5442 - RNA, 19 nt, Artificial Sequence
  Description of Artificial Sequence: Synthetic oligonucleotide
aaagacacacauccuuuug

SEQ ID NO: 5443 - RNA, 19 nt, Artificial Sequence
  Description of Artificial Sequence: Synthetic oligonucleotide
gaaagacacacauccuuuu

SEQ ID NO: 5444 - RNA, 19 nt, Artificial Sequence
  Description of Artificial Sequence: Synthetic oligonucleotide
agaaagacacacauccuuu

SEQ ID NO: 5445 - RNA, 19 nt, Artificial Sequence
  Description of Artificial Sequence: Synthetic oligonucleotide
gagaaagacacacauccuu

SEQ ID NO: 5446 - RNA, 19 nt, Artificial Sequence
  Description of Artificial Sequence: Synthetic oligonucleotide
ggagaaagacacacauccu

SEQ ID NO: 5447 - RNA, 19 nt, Artificial Sequence
  Description of Artificial Sequence: Synthetic oligonucleotide
gggagaaagacacacaucc

SEQ ID NO: 5448 - RNA, 19 nt, Artificial Sequence
  Description of Artificial Sequence: Synthetic oligonucleotide
ggggagaaagacacacauc

SEQ ID NO: 5449 - RNA, 19 nt, Artificial Sequence
  Description of Artificial Sequence: Synthetic oligonucleotide
cggggagaaagacacacau

SEQ ID NO: 5450 - RNA, 19 nt, Artificial Sequence
  Description of Artificial Sequence: Synthetic oligonucleotide
ucggggagaaagacacaca

SEQ ID NO: 5451 - RNA, 19 nt, Artificial Sequence
  Description of Artificial Sequence: Synthetic oligonucleotide
cucggggagaaagacacac

SEQ ID NO: 5452 - RNA, 19 nt, Artificial Sequence
  Description of Artificial Sequence: Synthetic oligonucleotide
gcucggggagaaagacaca

SEQ ID NO: 5453 - RNA, 19 nt, Artificial Sequence
  Description of Artificial Sequence: Synthetic oligonucleotide
agcucggggagaaagacac

SEQ ID NO: 5454 - RNA, 19 nt, Artificial Sequence
  Description of Artificial Sequence: Synthetic oligonucleotide
gagcucggggagaaagaca

SEQ ID NO: 5455 - RNA, 19 nt, Artificial Sequence
  Description of Artificial Sequence: Synthetic oligonucleotide
ggagcucggggagaaagac

SEQ ID NO: 5456 - RNA, 19 nt, Artificial Sequence
  Description of Artificial Sequence: Synthetic oligonucleotide
gggagcucggggagaaaga

SEQ ID NO: 5457 - RNA, 19 nt, Artificial Sequence
  Description of Artificial Sequence: Synthetic oligonucleotide
ggggagcucggggagaaag

SEQ ID NO: 5458 - RNA, 19 nt, Artificial Sequence
  Description of Artificial Sequence: Synthetic oligonucleotide
aggggagcucggggagaaa

SEQ ID NO: 5459 - RNA, 19 nt, Artificial Sequence
  Description of Artificial Sequence: Synthetic oligonucleotide
caggggagcucggggagaa

SEQ ID NO: 5460 - RNA, 19 nt, Artificial Sequence
  Description of Artificial Sequence: Synthetic oligonucleotide
acaggggagcucggggaga

SEQ ID NO: 5461 - RNA, 19 nt, Artificial Sequence
  Description of Artificial Sequence: Synthetic oligonucleotide
aacaggggagcucggggag

SEQ ID NO: 5462 - RNA, 19 nt, Artificial Sequence
  Description of Artificial Sequence: Synthetic oligonucleotide
gaacaggggagcucgggga

SEQ ID NO: 5463 - RNA, 19 nt, Artificial Sequence
  Description of Artificial Sequence: Synthetic oligonucleotide
ggaacaggggagcucgggg

SEQ ID NO: 5464 - RNA, 19 nt, Artificial Sequence
  Description of Artificial Sequence: Synthetic oligonucleotide
gggaacaggggagcucggg

SEQ ID NO: 5465 - RNA, 19 nt, Artificial Sequence
  Description of Artificial Sequence: Synthetic oligonucleotide
ggggaacaggggagcucgg

SEQ ID NO: 5466 - RNA, 19 nt, Artificial Sequence
  Description of Artificial Sequence: Synthetic oligonucleotide
aggggaacaggggagcucg

SEQ ID NO: 5467 - RNA, 19 nt, Artificial Sequence
  Description of Artificial Sequence: Synthetic oligonucleotide
aaggggaacaggggagcuc

SEQ ID NO: 5468 - RNA, 19 nt, Artificial Sequence
  Description of Artificial Sequence: Synthetic oligonucleotide
gaaggggaacaggggagcu

SEQ ID NO: 5469 - RNA, 19 nt, Artificial Sequence
  Description of Artificial Sequence: Synthetic oligonucleotide
ugaaggggaacaggggagc

SEQ ID NO: 5470 - RNA, 19 nt, Artificial Sequence
  Description of Artificial Sequence: Synthetic oligonucleotide
augaaggggaacaggggag

SEQ ID NO: 5471 - RNA, 19 nt, Artificial Sequence
  Description of Artificial Sequence: Synthetic oligonucleotide
aaugaaggggaacagggga

SEQ ID NO: 5472 - RNA, 19 nt, Artificial Sequence
  Description of Artificial Sequence: Synthetic oligonucleotide
caaugaaggggaacagggg

SEQ ID NO: 5473 - RNA, 19 nt, Artificial Sequence
  Description of Artificial Sequence: Synthetic oligonucleotide
ucaaugaaggggaacaggg

SEQ ID NO: 5474 - RNA, 19 nt, Artificial Sequence
  Description of Artificial Sequence: Synthetic oligonucleotide
uucaaugaaggggaacagg

SEQ ID NO: 5475 - RNA, 19 nt, Artificial Sequence
  Description of Artificial Sequence: Synthetic oligonucleotide
uuucaaugaaggggaacag

SEQ ID NO: 5476 - RNA, 19 nt, Artificial Sequence
  Description of Artificial Sequence: Synthetic oligonucleotide
uuuucaaugaaggggaaca

SEQ ID NO: 5477 - RNA, 19 nt, Artificial Sequence
  Description of Artificial Sequence: Synthetic oligonucleotide
guuuucaaugaaggggaac

SEQ ID NO: 5478 - RNA, 19 nt, Artificial Sequence
  Description of Artificial Sequence: Synthetic oligonucleotide
gguuuucaaugaaggggaa

SEQ ID NO: 5479 - RNA, 19 nt, Artificial Sequence
  Description of Artificial Sequence: Synthetic oligonucleotide
ugguuuucaaugaagggga

SEQ ID NO: 5480 - RNA, 19 nt, Artificial Sequence
  Description of Artificial Sequence: Synthetic oligonucleotide
gugguuuucaaugaagggg

SEQ ID NO: 5481 - RNA, 19 nt, Artificial Sequence
  Description of Artificial Sequence: Synthetic oligonucleotide
ggugguuuucaaugaaggg

SEQ ID NO: 5482 - RNA, 19 nt, Artificial Sequence
  Description of Artificial Sequence: Synthetic oligonucleotide
uggugguuuucaaugaagg

SEQ ID NO: 5483 - RNA, 19 nt, Artificial Sequence
  Description of Artificial Sequence: Synthetic oligonucleotide
guggugguuuucaaugaag

SEQ ID NO: 5484 - RNA, 19 nt, Artificial Sequence
  Description of Artificial Sequence: Synthetic oligonucleotide
cguggugguuuucaaugaa

SEQ ID NO: 5485 - RNA, 19 nt, Artificial Sequence
  Description of Artificial Sequence: Synthetic oligonucleotide
ccguggugguuuucaauga

SEQ ID NO: 5486 - RNA, 19 nt, Artificial Sequence
  Description of Artificial Sequence: Synthetic oligonucleotide
accguggugguuuucaaug

SEQ ID NO: 5487 - RNA, 19 nt, Artificial Sequence
  Description of Artificial Sequence: Synthetic oligonucleotide
caccguggugguuuucaau

SEQ ID NO: 5488 - RNA, 19 nt, Artificial Sequence
  Description of Artificial Sequence: Synthetic oligonucleotide
gcaccguggugguuuucaa

SEQ ID NO: 5489 - RNA, 19 nt, Artificial Sequence
  Description of Artificial Sequence: Synthetic oligonucleotide
ggcaccguggugguuuuca

SEQ ID NO: 5490 - RNA, 19 nt, Artificial Sequence
  Description of Artificial Sequence: Synthetic oligonucleotide
uggcaccguggugguuuuc

SEQ ID NO: 5491 - RNA, 19 nt, Artificial Sequence
  Description of Artificial Sequence: Synthetic oligonucleotide
auggcaccguggugguuuu

SEQ ID NO: 5492 - RNA, 19 nt, Artificial Sequence
  Description of Artificial Sequence: Synthetic oligonucleotide
gauggcaccguggugguuu

SEQ ID NO: 5493 - RNA, 19 nt, Artificial Sequence
  Description of Artificial Sequence: Synthetic oligonucleotide
agauggcaccguggugguu

SEQ ID NO: 5494 - RNA, 19 nt, Artificial Sequence
  Description of Artificial Sequence: Synthetic oligonucleotide
gagauggcaccgugguggu

SEQ ID NO: 5495 - RNA, 19 nt, Artificial Sequence
  Description of Artificial Sequence: Synthetic oligonucleotide
agagauggcaccguggugg

SEQ ID NO: 5496 - RNA, 19 nt, Artificial Sequence
  Description of Artificial Sequence: Synthetic oligonucleotide
aagagauggcaccguggug

SEQ ID NO: 5497 - RNA, 19 nt, Artificial Sequence
  Description of Artificial Sequence: Synthetic oligonucleotide
caagagauggcaccguggu

SEQ ID NO: 5498 - RNA, 19 nt, Artificial Sequence
  Description of Artificial Sequence: Synthetic oligonucleotide
acaagagauggcaccgugg

SEQ ID NO: 5499 - RNA, 19 nt, Artificial Sequence
  Description of Artificial Sequence: Synthetic oligonucleotide
cacaagagauggcaccgug

SEQ ID NO: 5500 - RNA, 19 nt, Artificial Sequence
  Description of Artificial Sequence: Synthetic oligonucleotide
acacaagagauggcaccgu

SEQ ID NO: 5501 - RNA, 19 nt, Artificial Sequence
  Description of Artificial Sequence: Synthetic oligonucleotide
uacacaagagauggcaccg

SEQ ID NO: 5502 - RNA, 19 nt, Artificial Sequence
  Description of Artificial Sequence: Synthetic oligonucleotide
auacacaagagauggcacc

SEQ ID NO: 5503 - RNA, 19 nt, Artificial Sequence
  Description of Artificial Sequence: Synthetic oligonucleotide
cauacacaagagauggcac

SEQ ID NO: 5504 - RNA, 19 nt, Artificial Sequence
  Description of Artificial Sequence: Synthetic oligonucleotide
gcauacacaagagauggca

SEQ ID NO: 5505 - RNA, 19 nt, Artificial Sequence
  Description of Artificial Sequence: Synthetic oligonucleotide
ugcauacacaagagauggc

SEQ ID NO: 5506 - RNA, 19 nt, Artificial Sequence
  Description of Artificial Sequence: Synthetic oligonucleotide
cugcauacacaagagaugg

SEQ ID NO: 5507 - RNA, 19 nt, Artificial Sequence
  Description of Artificial Sequence: Synthetic oligonucleotide
ccugcauacacaagagaug

SEQ ID NO: 5508 - RNA, 19 nt, Artificial Sequence
  Description of Artificial Sequence: Synthetic oligonucleotide
cccugcauacacaagagau

SEQ ID NO: 5509 - RNA, 19 nt, Artificial Sequence
  Description of Artificial Sequence: Synthetic oligonucleotide
gcccugcauacacaagaga

SEQ ID NO: 5510 - RNA, 19 nt, Artificial Sequence
  Description of Artificial Sequence: Synthetic oligonucleotide
agcccugcauacacaagag

SEQ ID NO: 5511 - RNA, 19 nt, Artificial Sequence
  Description of Artificial Sequence: Synthetic oligonucleotide
uagcccugcauacacaaga

SEQ ID NO: 5512 - RNA, 19 nt, Artificial Sequence
  Description of Artificial Sequence: Synthetic oligonucleotide
auagcccugcauacacaag

SEQ ID NO: 5513 - RNA, 19 nt, Artificial Sequence
  Description of Artificial Sequence: Synthetic oligonucleotide
cauagcccugcauacacaa

SEQ ID NO: 5514 - RNA, 19 nt, Artificial Sequence
  Description of Artificial Sequence: Synthetic oligonucleotide
gcauagcccugcauacaca

SEQ ID NO: 5515 - RNA, 19 nt, Artificial Sequence
  Description of Artificial Sequence: Synthetic oligonucleotide
ugcauagcccugcauacac

SEQ ID NO: 5516 - RNA, 19 nt, Artificial Sequence
  Description of Artificial Sequence: Synthetic oligonucleotide
gugcauagcccugcauaca

SEQ ID NO: 5517 - RNA, 19 nt, Artificial Sequence
  Description of Artificial Sequence: Synthetic oligonucleotide
ggugcauagcccugcauac

SEQ ID NO: 5518 - RNA, 19 nt, Artificial Sequence
  Description of Artificial Sequence: Synthetic oligonucleotide
aggugcauagcccugcaua

SEQ ID NO: 5519 - RNA, 19 nt, Artificial Sequence
  Description of Artificial Sequence: Synthetic oligonucleotide
caggugcauagcccugcau

SEQ ID NO: 5520 - RNA, 19 nt, Artificial Sequence
  Description of Artificial Sequence: Synthetic oligonucleotide
gcaggugcauagcccugca

SEQ ID NO: 5521 - RNA, 19 nt, Artificial Sequence
  Description of Artificial Sequence: Synthetic oligonucleotide
ugcaggugcauagcccugc

SEQ ID NO: 5522 - RNA, 19 nt, Artificial Sequence
  Description of Artificial Sequence: Synthetic oligonucleotide
cugcaggugcauagcccug

SEQ ID NO: 5523 - RNA, 19 nt, Artificial Sequence
  Description of Artificial Sequence: Synthetic oligonucleotide
ccugcaggugcauagcccu

SEQ ID NO: 5524 - RNA, 19 nt, Artificial Sequence
  Description of Artificial Sequence: Synthetic oligonucleotide
gccugcaggugcauagccc

SEQ ID NO: 5525 - RNA, 19 nt, Artificial Sequence
  Description of Artificial Sequence: Synthetic oligonucleotide
ugccugcaggugcauagcc

SEQ ID NO: 5526 - RNA, 19 nt, Artificial Sequence
  Description of Artificial Sequence: Synthetic oligonucleotide
gugccugcaggugcauagc

SEQ ID NO: 5527 - RNA, 19 nt, Artificial Sequence
  Description of Artificial Sequence: Synthetic oligonucleotide
cgugccugcaggugcauag

SEQ ID NO: 5528 - RNA, 19 nt, Artificial Sequence
  Description of Artificial Sequence: Synthetic oligonucleotide
acgugccugcaggugcaua

SEQ ID NO: 5529 - RNA, 19 nt, Artificial Sequence
  Description of Artificial Sequence: Synthetic oligonucleotide
cacgugccugcaggugcau

SEQ ID NO: 5530 - RNA, 19 nt, Artificial Sequence
  Description of Artificial Sequence: Synthetic oligonucleotide
acacgugccugcaggugca

SEQ ID NO: 5531 - RNA, 19 nt, Artificial Sequence
  Description of Artificial Sequence: Synthetic oligonucleotide
cacacgugccugcaggugc

SEQ ID NO: 5532 - RNA, 19 nt, Artificial Sequence
  Description of Artificial Sequence: Synthetic oligonucleotide
acacacgugccugcaggug

SEQ ID NO: 5533 - RNA, 19 nt, Artificial Sequence
  Description of Artificial Sequence: Synthetic oligonucleotide
uacacacgugccugcaggu

SEQ ID NO: 5534 - RNA, 19 nt, Artificial Sequence
  Description of Artificial Sequence: Synthetic oligonucleotide
auacacacgugccugcagg

SEQ ID NO: 5535 - RNA, 19 nt, Artificial Sequence
  Description of Artificial Sequence: Synthetic oligonucleotide
cauacacacgugccugcag

SEQ ID NO: 5536 - RNA, 19 nt, Artificial Sequence
  Description of Artificial Sequence: Synthetic oligonucleotide
gcauacacacgugccugca

SEQ ID NO: 5537 - RNA, 19 nt, Artificial Sequence
  Description of Artificial Sequence: Synthetic oligonucleotide
ugcauacacacgugccugc

SEQ ID NO: 5538 - RNA, 19 nt, Artificial Sequence
  Description of Artificial Sequence: Synthetic oligonucleotide
gugcauacacacgugccug

SEQ ID NO: 5539 - RNA, 19 nt, Artificial Sequence
  Description of Artificial Sequence: Synthetic oligonucleotide
agugcauacacacgugccu

SEQ ID NO: 5540 - RNA, 19 nt, Artificial Sequence
  Description of Artificial Sequence: Synthetic oligonucleotide
gagugcauacacacgugcc

SEQ ID NO: 5541 - RNA, 19 nt, Artificial Sequence
  Description of Artificial Sequence: Synthetic oligonucleotide
ggagugcauacacacgugc

SEQ ID NO: 5542 - RNA, 19 nt, Artificial Sequence
  Description of Artificial Sequence: Synthetic oligonucleotide
gggagugcauacacacgug

SEQ ID NO: 5543 - RNA, 19 nt, Artificial Sequence
  Description of Artificial Sequence: Synthetic oligonucleotide
ggggagugcauacacacgu

SEQ ID NO: 5544 - RNA, 19 nt, Artificial Sequence
  Description of Artificial Sequence: Synthetic oligonucleotide
cggggagugcauacacacg

SEQ ID NO: 5545 - RNA, 19 nt, Artificial Sequence
  Description of Artificial Sequence: Synthetic oligonucleotide
gcggggagugcauacacac

SEQ ID NO: 5546 - RNA, 19 nt, Artificial Sequence
  Description of Artificial Sequence: Synthetic oligonucleotide
agcggggagugcauacaca

SEQ ID NO: 5547 - RNA, 19 nt, Artificial Sequence
  Description of Artificial Sequence: Synthetic oligonucleotide
aagcggggagugcauacac

SEQ ID NO: 5548 - RNA, 19 nt, Artificial Sequence
  Description of Artificial Sequence: Synthetic oligonucleotide
caagcggggagugcauaca

SEQ ID NO: 5549 - RNA, 19 nt, Artificial Sequence
  Description of Artificial Sequence: Synthetic oligonucleotide
acaagcggggagugcauac

SEQ ID NO: 5550 - RNA, 19 nt, Artificial Sequence
  Description of Artificial Sequence: Synthetic oligonucleotide
cacaagcggggagugcaua

SEQ ID NO: 5551 - RNA, 19 nt, Artificial Sequence
  Description of Artificial Sequence: Synthetic oligonucleotide
acacaagcggggagugcau

SEQ ID NO: 5552 - RNA, 19 nt, Artificial Sequence
  Description of Artificial Sequence: Synthetic oligonucleotide
aacacaagcggggagugca

SEQ ID NO: 5553 - RNA, 19 nt, Artificial Sequence
  Description of Artificial Sequence: Synthetic oligonucleotide
aaacacaagcggggagugc

SEQ ID NO: 5554 - RNA, 19 nt, Artificial Sequence
  Description of Artificial Sequence: Synthetic oligonucleotide
uaaacacaagcggggagug

SEQ ID NO: 5555 - RNA, 19 nt, Artificial Sequence
  Description of Artificial Sequence: Synthetic oligonucleotide
guaaacacaagcggggagu

SEQ ID NO: 5556 - RNA, 19 nt, Artificial Sequence
  Description of Artificial Sequence: Synthetic oligonucleotide
uguaaacacaagcggggag

SEQ ID NO: 5557 - RNA, 19 nt, Artificial Sequence
  Description of Artificial Sequence: Synthetic oligonucleotide
guguaaacacaagcgggga

SEQ ID NO: 5558 - RNA, 19 nt, Artificial Sequence
  Description of Artificial Sequence: Synthetic oligonucleotide
uguguaaacacaagcgggg

SEQ ID NO: 5559 - RNA, 19 nt, Artificial Sequence
  Description of Artificial Sequence: Synthetic oligonucleotide
uuguguaaacacaagcggg

SEQ ID NO: 5560 - RNA, 19 nt, Artificial Sequence
  Description of Artificial Sequence: Synthetic oligonucleotide
cuuguguaaacacaagcgg

SEQ ID NO: 5561 - RNA, 19 nt, Artificial Sequence
  Description of Artificial Sequence: Synthetic oligonucleotide
gcuuguguaaacacaagcg

SEQ ID NO: 5562 - RNA, 19 nt, Artificial Sequence
  Description of Artificial Sequence: Synthetic oligonucleotide
agcuuguguaaacacaagc

SEQ ID NO: 5563 - RNA, 19 nt, Artificial Sequence
  Description of Artificial Sequence: Synthetic oligonucleotide
cagcuuguguaaacacaag

SEQ ID NO: 5564 - RNA, 19 nt, Artificial Sequence
  Description of Artificial Sequence: Synthetic oligonucleotide
acagcuuguguaaacacaa

SEQ ID NO: 5565 - RNA, 19 nt, Artificial Sequence
  Description of Artificial Sequence: Synthetic oligonucleotide
cacagcuuguguaaacaca

SEQ ID NO: 5566 - RNA, 19 nt, Artificial Sequence
  Description of Artificial Sequence: Synthetic oligonucleotide
ccacagcuuguguaaacac

SEQ ID NO: 5567 - RNA, 19 nt, Artificial Sequence
  Description of Artificial Sequence: Synthetic oligonucleotide
cccacagcuuguguaaaca

SEQ ID NO: 5568 - RNA, 19 nt, Artificial Sequence
  Description of Artificial Sequence: Synthetic oligonucleotide
ccccacagcuuguguaaac

SEQ ID NO: 5569 - RNA, 19 nt, Artificial Sequence
  Description of Artificial Sequence: Synthetic oligonucleotide
accccacagcuuguguaaa

SEQ ID NO: 5570 - RNA, 19 nt, Artificial Sequence
  Description of Artificial Sequence: Synthetic oligonucleotide
caccccacagcuuguguaa

SEQ ID NO: 5571 - RNA, 19 nt, Artificial Sequence
  Description of Artificial Sequence: Synthetic oligonucleotide
acaccccacagcuugugua

SEQ ID NO: 5572 - RNA, 19 nt, Artificial Sequence
  Description of Artificial Sequence: Synthetic oligonucleotide
aacaccccacagcuugugu

SEQ ID NO: 5573 - RNA, 19 nt, Artificial Sequence
  Description of Artificial Sequence: Synthetic oligonucleotide
uaacaccccacagcuugug

SEQ ID NO: 5574 - RNA, 19 nt, Artificial Sequence
  Description of Artificial Sequence: Synthetic oligonucleotide
guaacaccccacagcuugu

SEQ ID NO: 5575 - RNA, 19 nt, Artificial Sequence
  Description of Artificial Sequence: Synthetic oligonucleotide
cguaacaccccacagcuug

SEQ ID NO: 5576 - RNA, 19 nt, Artificial Sequence
  Description of Artificial Sequence: Synthetic oligonucleotide
gcguaacaccccacagcuu

SEQ ID NO: 5577 - RNA, 19 nt, Artificial Sequence
  Description of Artificial Sequence: Synthetic oligonucleotide
ugcguaacaccccacagcu

SEQ ID NO: 5578 - RNA, 19 nt, Artificial Sequence
  Description of Artificial Sequence: Synthetic oligonucleotide
augcguaacaccccacagc

SEQ ID NO: 5579 - RNA, 19 nt, Artificial Sequence
  Description of Artificial Sequence: Synthetic oligonucleotide
caugcguaacaccccacag

SEQ ID NO: 5580 - RNA, 19 nt, Artificial Sequence
  Description of Artificial Sequence: Synthetic oligonucleotide
gcaugcguaacaccccaca

SEQ ID NO: 5581 - RNA, 19 nt, Artificial Sequence
  Description of Artificial Sequence: Synthetic oligonucleotide
ggcaugcguaacaccccac

SEQ ID NO: 5582 - RNA, 19 nt, Artificial Sequence
  Description of Artificial Sequence: Synthetic oligonucleotide
aggcaugcguaacacccca

SEQ ID NO: 5583 - RNA, 19 nt, Artificial Sequence
  Description of Artificial Sequence: Synthetic oligonucleotide
caggcaugcguaacacccc

SEQ ID NO: 5584 - RNA, 19 nt, Artificial Sequence
  Description of Artificial Sequence: Synthetic oligonucleotide
gcaggcaugcguaacaccc

SEQ ID NO: 5585 - RNA, 19 nt, Artificial Sequence
  Description of Artificial Sequence: Synthetic oligonucleotide
agcaggcaugcguaacacc

SEQ ID NO: 5586 - RNA, 19 nt, Artificial Sequence
  Description of Artificial Sequence: Synthetic oligonucleotide
aagcaggcaugcguaacac

SEQ ID NO: 5587 - RNA, 19 nt, Artificial Sequence
  Description of Artificial Sequence: Synthetic oligonucleotide
aaagcaggcaugcguaaca

SEQ ID NO: 5588 - RNA, 19 nt, Artificial Sequence
  Description of Artificial Sequence: Synthetic oligonucleotide
aaaagcaggcaugcguaac

SEQ ID NO: 5589 - RNA, 19 nt, Artificial Sequence
  Description of Artificial Sequence: Synthetic oligonucleotide
aaaaagcaggcaugcguaa

SEQ ID NO: 5590 - RNA, 19 nt, Artificial Sequence
  Description of Artificial Sequence: Synthetic oligonucleotide
aaaaaagcaggcaugcgua

SEQ ID NO: 5591 - RNA, 19 nt, Artificial Sequence
  Description of Artificial Sequence: Synthetic oligonucleotide
gaaaaaagcaggcaugcgu

SEQ ID NO: 5592 - RNA, 19 nt, Artificial Sequence
  Description of Artificial Sequence: Synthetic oligonucleotide
ugaaaaaagcaggcaugcg

SEQ ID NO: 5593 - RNA, 19 nt, Artificial Sequence
  Description of Artificial Sequence: Synthetic oligonucleotide
gugaaaaaagcaggcaugc

SEQ ID NO: 5594 - RNA, 19 nt, Artificial Sequence
  Description of Artificial Sequence: Synthetic oligonucleotide
agugaaaaaagcaggcaug

SEQ ID NO: 5595 - RNA, 19 nt, Artificial Sequence
  Description of Artificial Sequence: Synthetic oligonucleotide
aagugaaaaaagcaggcau

SEQ ID NO: 5596 - RNA, 19 nt, Artificial Sequence
  Description of Artificial Sequence: Synthetic oligonucleotide
uaagugaaaaaagcaggca

SEQ ID NO: 5597 - RNA, 19 nt, Artificial Sequence
  Description of Artificial Sequence: Synthetic oligonucleotide
uuaagugaaaaaagcaggc

SEQ ID NO: 5598 - RNA, 19 nt, Artificial Sequence
  Description of Artificial Sequence: Synthetic oligonucleotide
auuaagugaaaaaagcagg

SEQ ID NO: 5599 - RNA, 19 nt, Artificial Sequence
  Description of Artificial Sequence: Synthetic oligonucleotide
uauuaagugaaaaaagcag

SEQ ID NO: 5600 - RNA, 19 nt, Artificial Sequence
  Description of Artificial Sequence: Synthetic oligonucleotide
uuauuaagugaaaaaagca

SEQ ID NO: 5601 - RNA, 19 nt, Artificial Sequence
  Description of Artificial Sequence: Synthetic oligonucleotide
auuauuaagugaaaaaagc

SEQ ID NO: 5602 - RNA, 19 nt, Artificial Sequence
  Description of Artificial Sequence: Synthetic oligonucleotide
uauuauuaagugaaaaaag

SEQ ID NO: 5603 - RNA, 19 nt, Artificial Sequence
  Description of Artificial Sequence: Synthetic oligonucleotide
guauuauuaagugaaaaaa

SEQ ID NO: 5604 - RNA, 19 nt, Artificial Sequence
  Description of Artificial Sequence: Synthetic oligonucleotide
uguauuauuaagugaaaaa

SEQ ID NO: 5605 - RNA, 19 nt, Artificial Sequence
  Description of Artificial Sequence: Synthetic oligonucleotide
cuguauuauuaagugaaaa

SEQ ID NO: 5606 - RNA, 19 nt, Artificial Sequence
  Description of Artificial Sequence: Synthetic oligonucleotide
gcuguauuauuaagugaaa

SEQ ID NO: 5607 - RNA, 19 nt, Artificial Sequence
  Description of Artificial Sequence: Synthetic oligonucleotide
agcuguauuauuaagugaa

SEQ ID NO: 5608 - RNA, 19 nt, Artificial Sequence
  Description of Artificial Sequence: Synthetic oligonucleotide
aagcuguauuauuaaguga

SEQ ID NO: 5609 - RNA, 19 nt, Artificial Sequence
  Description of Artificial Sequence: Synthetic oligonucleotide
caagcuguauuauuaagug

SEQ ID NO: 5610 - RNA, 19 nt, Artificial Sequence
  Description of Artificial Sequence: Synthetic oligonucleotide
ccaagcuguauuauuaagu

SEQ ID NO: 5611 - RNA, 19 nt, Artificial Sequence
  Description of Artificial Sequence: Synthetic oligonucleotide
uccaagcuguauuauuaag

SEQ ID NO: 5612 - RNA, 19 nt, Artificial Sequence
  Description of Artificial Sequence: Synthetic oligonucleotide
cuccaagcuguauuauuaa

SEQ ID NO: 5613 - RNA, 19 nt, Artificial Sequence
  Description of Artificial Sequence: Synthetic oligonucleotide
ucuccaagcuguauuauua

SEQ ID NO: 5614 - RNA, 19 nt, Artificial Sequence
  Description of Artificial Sequence: Synthetic oligonucleotide
cucuccaagcuguauuauu

SEQ ID NO: 5615 - RNA, 19 nt, Artificial Sequence
  Description of Artificial Sequence: Synthetic oligonucleotide
ucucuccaagcuguauuau

SEQ ID NO: 5616 - RNA, 19 nt, Artificial Sequence
  Description of Artificial Sequence: Synthetic oligonucleotide
aucucuccaagcuguauua

SEQ ID NO: 5617 - RNA, 19 nt, Artificial Sequence
  Description of Artificial Sequence: Synthetic oligonucleotide
aaucucuccaagcuguauu

SEQ ID NO: 5618 - RNA, 19 nt, Artificial Sequence
  Description of Artificial Sequence: Synthetic oligonucleotide
aaaucucuccaagcuguau

SEQ ID NO: 5619 - RNA, 19 nt, Artificial Sequence
  Description of Artificial Sequence: Synthetic oligonucleotide
aaaaucucuccaagcugua

SEQ ID NO: 5620 - RNA, 19 nt, Artificial Sequence
  Description of Artificial Sequence: Synthetic oligonucleotide
aaaaaucucuccaagcugu

SEQ ID NO: 5621 - RNA, 19 nt, Artificial Sequence
  Description of Artificial Sequence: Synthetic oligonucleotide
caaaaaucucuccaagcug

SEQ ID NO: 5622 - RNA, 19 nt, Artificial Sequence
  Description of Artificial Sequence: Synthetic oligonucleotide
acaaaaaucucuccaagcu

SEQ ID NO: 5623 - RNA, 19 nt, Artificial Sequence
  Description of Artificial Sequence: Synthetic oligonucleotide
uacaaaaaucucuccaagc

SEQ ID NO: 5624 - RNA, 19 nt, Artificial Sequence
  Description of Artificial Sequence: Synthetic oligonucleotide
auacaaaaaucucuccaag

SEQ ID NO: 5625 - RNA, 19 nt, Artificial Sequence
  Description of Artificial Sequence: Synthetic oligonucleotide
gauacaaaaaucucuccaa

SEQ ID NO: 5626 - RNA, 19 nt, Artificial Sequence
  Description of Artificial Sequence: Synthetic oligonucleotide
ugauacaaaaaucucucca

SEQ ID NO: 5627 - RNA, 19 nt, Artificial Sequence
  Description of Artificial Sequence: Synthetic oligonucleotide
gugauacaaaaaucucucc

SEQ ID NO: 5628 - RNA, 19 nt, Artificial Sequence
  Description of Artificial Sequence: Synthetic oligonucleotide
ugugauacaaaaaucucuc

SEQ ID NO: 5629 - RNA, 19 nt, Artificial Sequence
  Description of Artificial Sequence: Synthetic oligonucleotide
augugauacaaaaaucucu

SEQ ID NO: 5630 - RNA, 19 nt, Artificial Sequence
  Description of Artificial Sequence: Synthetic oligonucleotide
aaugugauacaaaaaucuc

SEQ ID NO: 5631 - RNA, 19 nt, Artificial Sequence
  Description of Artificial Sequence: Synthetic oligonucleotide
uaaugugauacaaaaaucu

SEQ ID NO: 5632 - RNA, 19 nt, Artificial Sequence
  Description of Artificial Sequence: Synthetic oligonucleotide
auaaugugauacaaaaauc

SEQ ID NO: 5633 - RNA, 19 nt, Artificial Sequence
  Description of Artificial Sequence: Synthetic oligonucleotide
uauaaugugauacaaaaau

SEQ ID NO: 5634 - RNA, 19 nt, Artificial Sequence
  Description of Artificial Sequence: Synthetic oligonucleotide
uuauaaugugauacaaaaa

SEQ ID NO: 5635 - RNA, 19 nt, Artificial Sequence
  Description of Artificial Sequence: Synthetic oligonucleotide
uuuauaaugugauacaaaa

SEQ ID NO: 5636 - RNA, 19 nt, Artificial Sequence
  Description of Artificial Sequence: Synthetic oligonucleotide
auuuauaaugugauacaaa

SEQ ID NO: 5637 - RNA, 19 nt, Artificial Sequence
  Description of Artificial Sequence: Synthetic oligonucleotide
gauuuauaaugugauacaa

SEQ ID NO: 5638 - RNA, 19 nt, Artificial Sequence
  Description of Artificial Sequence: Synthetic oligonucleotide
ggauuuauaaugugauaca

SEQ ID NO: 5639 - RNA, 19 nt, Artificial Sequence
  Description of Artificial Sequence: Synthetic oligonucleotide
gggauuuauaaugugauac

SEQ ID NO: 5640 - RNA, 19 nt, Artificial Sequence
  Description of Artificial Sequence: Synthetic oligonucleotide
ugggauuuauaaugugaua

SEQ ID NO: 5641 - RNA, 19 nt, Artificial Sequence
  Description of Artificial Sequence: Synthetic oligonucleotide
gugggauuuauaaugugau

SEQ ID NO: 5642 - RNA, 19 nt, Artificial Sequence
  Description of Artificial Sequence: Synthetic oligonucleotide
agugggauuuauaauguga

SEQ ID NO: 5643 - RNA, 19 nt, Artificial Sequence
  Description of Artificial Sequence: Synthetic oligonucleotide
gagugggauuuauaaugug

SEQ ID NO: 5644 - RNA, 19 nt, Artificial Sequence
  Description of Artificial Sequence: Synthetic oligonucleotide
cgagugggauuuauaaugu

SEQ ID NO: 5645 - RNA, 19 nt, Artificial Sequence
  Description of Artificial Sequence: Synthetic oligonucleotide
gcgagugggauuuauaaug

SEQ ID NO: 5646 - RNA, 19 nt, Artificial Sequence
  Description of Artificial Sequence: Synthetic oligonucleotide
agcgagugggauuuauaau

SEQ ID NO: 5647 - RNA, 19 nt, Artificial Sequence
  Description of Artificial Sequence: Synthetic oligonucleotide
gagcgagugggauuuauaa

SEQ ID NO: 5648 - RNA, 19 nt, Artificial Sequence
  Description of Artificial Sequence: Synthetic oligonucleotide
agagcgagugggauuuaua

SEQ ID NO: 5649 - RNA, 19 nt, Artificial Sequence
  Description of Artificial Sequence: Synthetic oligonucleotide
aagagcgagugggauuuau

SEQ ID NO: 5650 - RNA, 19 nt, Artificial Sequence
  Description of Artificial Sequence: Synthetic oligonucleotide
aaagagcgagugggauuua

SEQ ID NO: 5651 - RNA, 19 nt, Artificial Sequence
  Description of Artificial Sequence: Synthetic oligonucleotide
aaaagagcgagugggauuu

SEQ ID NO: 5652 - RNA, 19 nt, Artificial Sequence
  Description of Artificial Sequence: Synthetic oligonucleotide
aaaaagagcgagugggauu

SEQ ID NO: 5653 - RNA, 19 nt, Artificial Sequence
  Description of Artificial Sequence: Synthetic oligonucleotide
caaaaagagcgagugggau

SEQ ID NO: 5654 - RNA, 19 nt, Artificial Sequence
  Description of Artificial Sequence: Synthetic oligonucleotide
ucaaaaagagcgaguggga

SEQ ID NO: 5655 - RNA, 19 nt, Artificial Sequence
  Description of Artificial Sequence: Synthetic oligonucleotide
aucaaaaagagcgaguggg

SEQ ID NO: 5656 - RNA, 19 nt, Artificial Sequence
  Description of Artificial Sequence: Synthetic oligonucleotide
caucaaaaagagcgagugg

SEQ ID NO: 5657 - RNA, 19 nt, Artificial Sequence
  Description of Artificial Sequence: Synthetic oligonucleotide
ccaucaaaaagagcgagug

SEQ ID NO: 5658 - RNA, 19 nt, Artificial Sequence
  Description of Artificial Sequence: Synthetic oligonucleotide
gccaucaaaaagagcgagu

SEQ ID NO: 5659 - RNA, 19 nt, Artificial Sequence
  Description of Artificial Sequence: Synthetic oligonucleotide
ggccaucaaaaagagcgag

SEQ ID NO: 5660 - RNA, 19 nt, Artificial Sequence
  Description of Artificial Sequence: Synthetic oligonucleotide
uggccaucaaaaagagcga

SEQ ID NO: 5661 - RNA, 19 nt, Artificial Sequence
  Description of Artificial Sequence: Synthetic oligonucleotide
guggccaucaaaaagagcg

SEQ ID NO: 5662 - RNA, 19 nt, Artificial Sequence
  Description of Artificial Sequence: Synthetic oligonucleotide
uguggccaucaaaaagagc

SEQ ID NO: 5663 - RNA, 19 nt, Artificial Sequence
  Description of Artificial Sequence: Synthetic oligonucleotide
auguggccaucaaaaagag

SEQ ID NO: 5664 - RNA, 19 nt, Artificial Sequence
  Description of Artificial Sequence: Synthetic oligonucleotide
uauguggccaucaaaaaga

SEQ ID NO: 5665 - RNA, 19 nt, Artificial Sequence
  Description of Artificial Sequence: Synthetic oligonucleotide
uuauguggccaucaaaaag

SEQ ID NO: 5666 - RNA, 19 nt, Artificial Sequence
  Description of Artificial Sequence: Synthetic oligonucleotide
auuauguggccaucaaaaa

SEQ ID NO: 5667 - RNA, 19 nt, Artificial Sequence
  Description of Artificial Sequence: Synthetic oligonucleotide
uauuauguggccaucaaaa

SEQ ID NO: 5668 - RNA, 19 nt, Artificial Sequence
  Description of Artificial Sequence: Synthetic oligonucleotide
uuauuauguggccaucaaa

SEQ ID NO: 5669 - RNA, 19 nt, Artificial Sequence
  Description of Artificial Sequence: Synthetic oligonucleotide
guuauuauguggccaucaa

SEQ ID NO: 5670 - RNA, 19 nt, Artificial Sequence
  Description of Artificial Sequence: Synthetic oligonucleotide
aguuauuauguggccauca

SEQ ID NO: 5671 - RNA, 19 nt, Artificial Sequence
  Description of Artificial Sequence: Synthetic oligonucleotide
uaguuauuauguggccauc

SEQ ID NO: 5672 - RNA, 19 nt, Artificial Sequence
  Description of Artificial Sequence: Synthetic oligonucleotide
guaguuauuauguggccau

SEQ ID NO: 5673 - RNA, 19 nt, Artificial Sequence
  Description of Artificial Sequence: Synthetic oligonucleotide
aguaguuauuauguggcca

SEQ ID NO: 5674 - RNA, 19 nt, Artificial Sequence
  Description of Artificial Sequence: Synthetic oligonucleotide
caguaguuauuauguggcc

SEQ ID NO: 5675 - RNA, 19 nt, Artificial Sequence
  Description of Artificial Sequence: Synthetic oligonucleotide
gcaguaguuauuauguggc

SEQ ID NO: 5676 - RNA, 19 nt, Artificial Sequence
  Description of Artificial Sequence: Synthetic oligonucleotide
ugcaguaguuauuaugugg

SEQ ID NO: 5677 - RNA, 19 nt, Artificial Sequence
  Description of Artificial Sequence: Synthetic oligonucleotide
augcaguaguuauuaugug

SEQ ID NO: 5678 - RNA, 19 nt, Artificial Sequence
  Description of Artificial Sequence: Synthetic oligonucleotide
uaugcaguaguuauuaugu

SEQ ID NO: 5679 - RNA, 19 nt, Artificial Sequence
  Description of Artificial Sequence: Synthetic oligonucleotide
uuaugcaguaguuauuaug

SEQ ID NO: 5680 - RNA, 19 nt, Artificial Sequence
  Description of Artificial Sequence: Synthetic oligonucleotide
auuaugcaguaguuauuau

SEQ ID NO: 5681 - RNA, 19 nt, Artificial Sequence
  Description of Artificial Sequence: Synthetic oligonucleotide
uauuaugcaguaguuauua

SEQ ID NO: 5682 - RNA, 19 nt, Artificial Sequence
  Description of Artificial Sequence: Synthetic oligonucleotide
auauuaugcaguaguuauu

SEQ ID NO: 5683 - RNA, 19 nt, Artificial Sequence
  Description of Artificial Sequence: Synthetic oligonucleotide
cauauuaugcaguaguuau

SEQ ID NO: 5684 - RNA, 19 nt, Artificial Sequence
  Description of Artificial Sequence: Synthetic oligonucleotide
ccauauuaugcaguaguua

SEQ ID NO: 5685 - RNA, 19 nt, Artificial Sequence
  Description of Artificial Sequence: Synthetic oligonucleotide
uccauauuaugcaguaguu

SEQ ID NO: 5686 - RNA, 19 nt, Artificial Sequence
  Description of Artificial Sequence: Synthetic oligonucleotide
auccauauuaugcaguagu

SEQ ID NO: 5687 - RNA, 19 nt, Artificial Sequence
  Description of Artificial Sequence: Synthetic oligonucleotide
uauccauauuaugcaguag

SEQ ID NO: 5688 - RNA, 19 nt, Artificial Sequence
  Description of Artificial Sequence: Synthetic oligonucleotide
guauccauauuaugcagua

SEQ ID NO: 5689 - RNA, 19 nt, Artificial Sequence
  Description of Artificial Sequence: Synthetic oligonucleotide
cguauccauauuaugcagu

SEQ ID NO: 5690 - RNA, 19 nt, Artificial Sequence
  Description of Artificial Sequence: Synthetic oligonucleotide
gcguauccauauuaugcag

SEQ ID NO: 5691 - RNA, 19 nt, Artificial Sequence
  Description of Artificial Sequence: Synthetic oligonucleotide
ggcguauccauauuaugca

SEQ ID NO: 5692 - RNA, 19 nt, Artificial Sequence
  Description of Artificial Sequence: Synthetic oligonucleotide
aggcguauccauauuaugc

SEQ ID NO: 5693 - RNA, 19 nt, Artificial Sequence
  Description of Artificial Sequence: Synthetic oligonucleotide
aaggcguauccauauuaug

SEQ ID NO: 5694 - RNA, 19 nt, Artificial Sequence
  Description of Artificial Sequence: Synthetic oligonucleotide
uaaggcguauccauauuau

SEQ ID NO: 5695 - RNA, 19 nt, Artificial Sequence
  Description of Artificial Sequence: Synthetic oligonucleotide
auaaggcguauccauauua

SEQ ID NO: 5696 - RNA, 19 nt, Artificial Sequence
  Description of Artificial Sequence: Synthetic oligonucleotide
aauaaggcguauccauauu

SEQ ID NO: 5697 - RNA, 19 nt, Artificial Sequence
  Description of Artificial Sequence: Synthetic oligonucleotide
aaauaaggcguauccauau

SEQ ID NO: 5698 - RNA, 19 nt, Artificial Sequence
  Description of Artificial Sequence: Synthetic oligonucleotide
caaauaaggcguauccaua

SEQ ID NO: 5699 - RNA, 19 nt, Artificial Sequence
  Description of Artificial Sequence: Synthetic oligonucleotide
ucaaauaaggcguauccau

SEQ ID NO: 5700 - RNA, 19 nt, Artificial Sequence
  Description of Artificial Sequence: Synthetic oligonucleotide
aucaaauaaggcguaucca

SEQ ID NO: 5701 - RNA, 19 nt, Artificial Sequence
  Description of Artificial Sequence: Synthetic oligonucleotide
aaucaaauaaggcguaucc

SEQ ID NO: 5702 - RNA, 19 nt, Artificial Sequence
  Description of Artificial Sequence: Synthetic oligonucleotide
aaaucaaauaaggcguauc

SEQ ID NO: 5703 - RNA, 19 nt, Artificial Sequence
  Description of Artificial Sequence: Synthetic oligonucleotide
uaaaucaaauaaggcguau

SEQ ID NO: 5704 - RNA, 19 nt, Artificial Sequence
  Description of Artificial Sequence: Synthetic oligonucleotide
uuaaaucaaauaaggcgua

SEQ ID NO: 5705 - RNA, 19 nt, Artificial Sequence
  Description of Artificial Sequence: Synthetic oligonucleotide
guuaaaucaaauaaggcgu

SEQ ID NO: 5706 - RNA, 19 nt, Artificial Sequence
  Description of Artificial Sequence: Synthetic oligonucleotide
aguuaaaucaaauaaggcg

SEQ ID NO: 5707 - RNA, 19 nt, Artificial Sequence
  Description of Artificial Sequence: Synthetic oligonucleotide
uaguuaaaucaaauaaggc

SEQ ID NO: 5708 - RNA, 19 nt, Artificial Sequence
  Description of Artificial Sequence: Synthetic oligonucleotide
cuaguuaaaucaaauaagg

SEQ ID NO: 5709 - RNA, 19 nt, Artificial Sequence
  Description of Artificial Sequence: Synthetic oligonucleotide
acuaguuaaaucaaauaag

SEQ ID NO: 5710 - RNA, 19 nt, Artificial Sequence
  Description of Artificial Sequence: Synthetic oligonucleotide
aacuaguuaaaucaaauaa

SEQ ID NO: 5711 - RNA, 19 nt, Artificial Sequence
  Description of Artificial Sequence: Synthetic oligonucleotide
gaacuaguuaaaucaaaua

SEQ ID NO: 5712 - RNA, 19 nt, Artificial Sequence
  Description of Artificial Sequence: Synthetic oligonucleotide
ggaacuaguuaaaucaaau

SEQ ID NO: 5713 - RNA, 19 nt, Artificial Sequence
  Description of Artificial Sequence: Synthetic oligonucleotide
gggaacuaguuaaaucaaa

SEQ ID NO: 5714 - RNA, 19 nt, Artificial Sequence
  Description of Artificial Sequence: Synthetic oligonucleotide
agggaacuaguuaaaucaa

SEQ ID NO: 5715 - RNA, 19 nt, Artificial Sequence
  Description of Artificial Sequence: Synthetic oligonucleotide
uagggaacuaguuaaauca

SEQ ID NO: 5716 - RNA, 19 nt, Artificial Sequence
  Description of Artificial Sequence: Synthetic oligonucleotide
uuagggaacuaguuaaauc

SEQ ID NO: 5717 - RNA, 19 nt, Artificial Sequence
  Description of Artificial Sequence: Synthetic oligonucleotide
auuagggaacuaguuaaau

SEQ ID NO: 5718 - RNA, 19 nt, Artificial Sequence
  Description of Artificial Sequence: Synthetic oligonucleotide
cauuagggaacuaguuaaa

SEQ ID NO: 5719 - RNA, 19 nt, Artificial Sequence
  Description of Artificial Sequence: Synthetic oligonucleotide
ucauuagggaacuaguuaa

SEQ ID NO: 5720 - RNA, 19 nt, Artificial Sequence
  Description of Artificial Sequence: Synthetic oligonucleotide
aucauuagggaacuaguua

SEQ ID NO: 5721 - RNA, 19 nt, Artificial Sequence
  Description of Artificial Sequence: Synthetic oligonucleotide
caucauuagggaacuaguu

SEQ ID NO: 5722 - RNA, 19 nt, Artificial Sequence
  Description of Artificial Sequence: Synthetic oligonucleotide
ccaucauuagggaacuagu

SEQ ID NO: 5723 - RNA, 19 nt, Artificial Sequence
  Description of Artificial Sequence: Synthetic oligonucleotide
uccaucauuagggaacuag

SEQ ID NO: 5724 - RNA, 19 nt, Artificial Sequence
  Description of Artificial Sequence: Synthetic oligonucleotide
guccaucauuagggaacua

SEQ ID NO: 5725 - RNA, 19 nt, Artificial Sequence
  Description of Artificial Sequence: Synthetic oligonucleotide
aguccaucauuagggaacu

SEQ ID NO: 5726 - RNA, 19 nt, Artificial Sequence
  Description of Artificial Sequence: Synthetic oligonucleotide
aaguccaucauuagggaac

SEQ ID NO: 5727 - RNA, 19 nt, Artificial Sequence
  Description of Artificial Sequence: Synthetic oligonucleotide
aaaguccaucauuagggaa

SEQ ID NO: 5728 - RNA, 19 nt, Artificial Sequence
  Description of Artificial Sequence: Synthetic oligonucleotide
aaaaguccaucauuaggga

SEQ ID NO: 5729 - RNA, 19 nt, Artificial Sequence
  Description of Artificial Sequence: Synthetic oligonucleotide
uaaaaguccaucauuaggg

SEQ ID NO: 5730 - RNA, 19 nt, Artificial Sequence
  Description of Artificial Sequence: Synthetic oligonucleotide
uuaaaaguccaucauuagg

SEQ ID NO: 5731 - RNA, 19 nt, Artificial Sequence
  Description of Artificial Sequence: Synthetic oligonucleotide
cuuaaaaguccaucauuag

SEQ ID NO: 5732 - RNA, 19 nt, Artificial Sequence
  Description of Artificial Sequence: Synthetic oligonucleotide
acuuaaaaguccaucauua

SEQ ID NO: 5733 - RNA, 19 nt, Artificial Sequence
  Description of Artificial Sequence: Synthetic oligonucleotide
aacuuaaaaguccaucauu

SEQ ID NO: 5734 - RNA, 19 nt, Artificial Sequence
  Description of Artificial Sequence: Synthetic oligonucleotide
caacuuaaaaguccaucau

SEQ ID NO: 5735 - RNA, 19 nt, Artificial Sequence
  Description of Artificial Sequence: Synthetic oligonucleotide
acaacuuaaaaguccauca

SEQ ID NO: 5736 - RNA, 19 nt, Artificial Sequence
  Description of Artificial Sequence: Synthetic oligonucleotide
aacaacuuaaaaguccauc

SEQ ID NO: 5737 - RNA, 19 nt, Artificial Sequence
  Description of Artificial Sequence: Synthetic oligonucleotide
aaacaacuuaaaaguccau

SEQ ID NO: 5738 - RNA, 19 nt, Artificial Sequence
  Description of Artificial Sequence: Synthetic oligonucleotide
gaaacaacuuaaaagucca

SEQ ID NO: 5739 - RNA, 19 nt, Artificial Sequence
  Description of Artificial Sequence: Synthetic oligonucleotide
ggaaacaacuuaaaagucc

SEQ ID NO: 5740 - RNA, 19 nt, Artificial Sequence
  Description of Artificial Sequence: Synthetic oligonucleotide
aggaaacaacuuaaaaguc

SEQ ID NO: 5741 - RNA, 19 nt, Artificial Sequence
  Description of Artificial Sequence: Synthetic oligonucleotide
aaggaaacaacuuaaaagu

SEQ ID NO: 5742 - RNA, 19 nt, Artificial Sequence
  Description of Artificial Sequence: Synthetic oligonucleotide
aaaggaaacaacuuaaaag

SEQ ID NO: 5743 - RNA, 19 nt, Artificial Sequence
  Description of Artificial Sequence: Synthetic oligonucleotide
aaaaggaaacaacuuaaaa

SEQ ID NO: 5744 - RNA, 19 nt, Artificial Sequence
  Description of Artificial Sequence: Synthetic oligonucleotide
aaaaaggaaacaacuuaaa

SEQ ID NO: 5745 - RNA, 19 nt, Artificial Sequence
  Description of Artificial Sequence: Synthetic oligonucleotide
aaaaaaggaaacaacuuaa

SEQ ID NO: 5746 - RNA, 19 nt, Artificial Sequence
  Description of Artificial Sequence: Synthetic oligonucleotide
aaaaaaaggaaacaacuua

SEQ ID NO: 5747 - RNA, 19 nt, Artificial Sequence
  Description of Artificial Sequence: Synthetic oligonucleotide
aaaaaaaaggaaacaacuu

SEQ ID NO: 5748 - RNA, 19 nt, Artificial Sequence
  Description of Artificial Sequence: Synthetic oligonucleotide
aaaaaaaaaggaaacaacu

SEQ ID NO: 5749 - RNA, 19 nt, Artificial Sequence
  Description of Artificial Sequence: Synthetic oligonucleotide
gaaaaaaaaaggaaacaac

SEQ ID NO: 5750 - RNA, 19 nt, Artificial Sequence
  Description of Artificial Sequence: Synthetic oligonucleotide
agaaaaaaaaaggaaacaa

SEQ ID NO: 5751 - RNA, 19 nt, Artificial Sequence
  Description of Artificial Sequence: Synthetic oligonucleotide
aagaaaaaaaaaggaaaca

SEQ ID NO: 5752 - RNA, 19 nt, Artificial Sequence
  Description of Artificial Sequence: Synthetic oligonucleotide
aaagaaaaaaaaaggaaac

SEQ ID NO: 5753 - RNA, 19 nt, Artificial Sequence
  Description of Artificial Sequence: Synthetic oligonucleotide
aaaagaaaaaaaaaggaaa

SEQ ID NO: 5754 - RNA, 19 nt, Artificial Sequence
  Description of Artificial Sequence: Synthetic oligonucleotide
aaaaagaaaaaaaaaggaa

SEQ ID NO: 5755 - RNA, 19 nt, Artificial Sequence
  Description of Artificial Sequence: Synthetic oligonucleotide
aaaaaagaaaaaaaaagga

SEQ ID NO: 5756 - RNA, 19 nt, Artificial Sequence
  Description of Artificial Sequence: Synthetic oligonucleotide
caaaaaagaaaaaaaaagg

SEQ ID NO: 5757 - RNA, 19 nt, Artificial Sequence
  Description of Artificial Sequence: Synthetic oligonucleotide
gcaaaaaagaaaaaaaaag

SEQ ID NO: 5758 - RNA, 19 nt, Artificial Sequence
  Description of Artificial Sequence: Synthetic oligonucleotide
agcaaaaaagaaaaaaaaa

SEQ ID NO: 5759 - RNA, 19 nt, Artificial Sequence
  Description of Artificial Sequence: Synthetic oligonucleotide
uagcaaaaaagaaaaaaaa

SEQ ID NO: 5760 - RNA, 19 nt, Artificial Sequence
  Description of Artificial Sequence: Synthetic oligonucleotide
guagcaaaaaagaaaaaaa

SEQ ID NO: 5761 - RNA, 19 nt, Artificial Sequence
  Description of Artificial Sequence: Synthetic oligonucleotide
aguagcaaaaaagaaaaaa

SEQ ID NO: 5762 - RNA, 19 nt, Artificial Sequence
  Description of Artificial Sequence: Synthetic oligonucleotide
caguagcaaaaaagaaaaa

SEQ ID NO: 5763 - RNA, 19 nt, Artificial Sequence
  Description of Artificial Sequence: Synthetic oligonucleotide
gcaguagcaaaaaagaaaa

SEQ ID NO: 5764 - RNA, 19 nt, Artificial Sequence
  Description of Artificial Sequence: Synthetic oligonucleotide
ugcaguagcaaaaaagaaa

SEQ ID NO: 5765 - RNA, 19 nt, Artificial Sequence
  Description of Artificial Sequence: Synthetic oligonucleotide
uugcaguagcaaaaaagaa

SEQ ID NO: 5766 - RNA, 19 nt, Artificial Sequence
  Description of Artificial Sequence: Synthetic oligonucleotide
uuugcaguagcaaaaaaga

SEQ ID NO: 5767 - RNA, 19 nt, Artificial Sequence
  Description of Artificial Sequence: Synthetic oligonucleotide
guuugcaguagcaaaaaag

SEQ ID NO: 5768 - RNA, 19 nt, Artificial Sequence
  Description of Artificial Sequence: Synthetic oligonucleotide
cguuugcaguagcaaaaaa

SEQ ID NO: 5769 - RNA, 19 nt, Artificial Sequence
  Description of Artificial Sequence: Synthetic oligonucleotide
ucguuugcaguagcaaaaa

SEQ ID NO: 5770 - RNA, 19 nt, Artificial Sequence
  Description of Artificial Sequence: Synthetic oligonucleotide
aucguuugcaguagcaaaa

SEQ ID NO: 5771 - RNA, 19 nt, Artificial Sequence
  Description of Artificial Sequence: Synthetic oligonucleotide
caucguuugcaguagcaaa

SEQ ID NO: 5772 - RNA, 19 nt, Artificial Sequence
  Description of Artificial Sequence: Synthetic oligonucleotide
gcaucguuugcaguagcaa

SEQ ID NO: 5773 - RNA, 19 nt, Artificial Sequence
  Description of Artificial Sequence: Synthetic oligonucleotide
agcaucguuugcaguagca

SEQ ID NO: 5774 - RNA, 19 nt, Artificial Sequence
  Description of Artificial Sequence: Synthetic oligonucleotide
uagcaucguuugcaguagc

SEQ ID NO: 5775 - RNA, 19 nt, Artificial Sequence
  Description of Artificial Sequence: Synthetic oligonucleotide
auagcaucguuugcaguag

SEQ ID NO: 5776 - RNA, 19 nt, Artificial Sequence
  Description of Artificial Sequence: Synthetic oligonucleotide
uauagcaucguuugcagua

SEQ ID NO: 5777 - RNA, 19 nt, Artificial Sequence
  Description of Artificial Sequence: Synthetic oligonucleotide
uuauagcaucguuugcagu

SEQ ID NO: 5778 - RNA, 19 nt, Artificial Sequence
  Description of Artificial Sequence: Synthetic oligonucleotide
auuauagcaucguuugcag

SEQ ID NO: 5779 - RNA, 19 nt, Artificial Sequence
  Description of Artificial Sequence: Synthetic oligonucleotide
uauuauagcaucguuugca

SEQ ID NO: 5780 - RNA, 19 nt, Artificial Sequence
  Description of Artificial Sequence: Synthetic oligonucleotide
uuauuauagcaucguuugc

SEQ ID NO: 5781 - RNA, 19 nt, Artificial Sequence
  Description of Artificial Sequence: Synthetic oligonucleotide
uuuauuauagcaucguuug

SEQ ID NO: 5782 - RNA, 19 nt, Artificial Sequence
  Description of Artificial Sequence: Synthetic oligonucleotide
auuuauuauagcaucguuu

SEQ ID NO: 5783 - RNA, 19 nt, Artificial Sequence
  Description of Artificial Sequence: Synthetic oligonucleotide
cauuuauuauagcaucguu

SEQ ID NO: 5784 - RNA, 19 nt, Artificial Sequence
  Description of Artificial Sequence: Synthetic oligonucleotide
acauuuauuauagcaucgu

SEQ ID NO: 5785 - RNA, 19 nt, Artificial Sequence
  Description of Artificial Sequence: Synthetic oligonucleotide
gacauuuauuauagcaucg

SEQ ID NO: 5786 - RNA, 19 nt, Artificial Sequence
  Description of Artificial Sequence: Synthetic oligonucleotide
ggacauuuauuauagcauc

SEQ ID NO: 5787 - RNA, 19 nt, Artificial Sequence
  Description of Artificial Sequence: Synthetic oligonucleotide
aggacauuuauuauagcau

SEQ ID NO: 5788 - RNA, 19 nt, Artificial Sequence
  Description of Artificial Sequence: Synthetic oligonucleotide
aaggacauuuauuauagca

SEQ ID NO: 5789 - RNA, 19 nt, Artificial Sequence
  Description of Artificial Sequence: Synthetic oligonucleotide
uaaggacauuuauuauagc

SEQ ID NO: 5790 - RNA, 19 nt, Artificial Sequence
  Description of Artificial Sequence: Synthetic oligonucleotide
auaaggacauuuauuauag

SEQ ID NO: 5791 - RNA, 19 nt, Artificial Sequence
  Description of Artificial Sequence: Synthetic oligonucleotide
gauaaggacauuuauuaua

SEQ ID NO: 5792 - RNA, 19 nt, Artificial Sequence
  Description of Artificial Sequence: Synthetic oligonucleotide
ugauaaggacauuuauuau

SEQ ID NO: 5793 - RNA, 19 nt, Artificial Sequence
  Description of Artificial Sequence: Synthetic oligonucleotide
uugauaaggacauuuauua

SEQ ID NO: 5794 - RNA, 19 nt, Artificial Sequence
  Description of Artificial Sequence: Synthetic oligonucleotide
uuugauaaggacauuuauu

SEQ ID NO: 5795 - RNA, 19 nt, Artificial Sequence
  Description of Artificial Sequence: Synthetic oligonucleotide
uuuugauaaggacauuuau

SEQ ID NO: 5796 - RNA, 19 nt, Artificial Sequence
  Description of Artificial Sequence: Synthetic oligonucleotide
uuuuugauaaggacauuua

SEQ ID NO: 5797 - RNA, 21 nt, Artificial Sequence
  Description of Artificial Sequence: Synthetic oligonucleotide
caguucacagcugccaauauu

SEQ ID NO: 5798 - RNA, 21 nt, Artificial Sequence
  Description of Artificial Sequence: Synthetic oligonucleotide
agcacuucagacaaggucauu

SEQ ID NO: 5799 - RNA, 21 nt, Artificial Sequence
  Description of Artificial Sequence: Synthetic oligonucleotide
ccagagacacugcggaauauu

SEQ ID NO: 5800 - RNA, 21 nt, Artificial Sequence
  Description of Artificial Sequence: Synthetic oligonucleotide
cugcggaauuugcugccaauu

SEQ ID NO: 5801 - RNA, 21 nt, Artificial Sequence
  Description of Artificial Sequence: Synthetic oligonucleotide
agccaguuuuuaagggacauu

SEQ ID NO: 5802 - RNA, 21 nt, Artificial Sequence
  Description of Artificial Sequence: Synthetic oligonucleotide
ccaguuuuuaagggacacauu

SEQ ID NO: 5803 - RNA, 21 nt, Artificial Sequence
  Description of Artificial Sequence: Synthetic oligonucleotide
caguuuuuaagggacaccauu

SEQ ID NO: 5804 - RNA, 21 nt, Artificial Sequence
  Description of Artificial Sequence: Synthetic oligonucleotide
uuuuuaagggacaccagaauu

SEQ ID NO: 5805 - RNA, 21 nt, Artificial Sequence
  Description of Artificial Sequence: Synthetic oligonucleotide
uuuaagggacaccagagcauu

SEQ ID NO: 5806 - RNA, 21 nt, Artificial Sequence
  Description of Artificial Sequence: Synthetic oligonucleotide
agccugcucugauucuauauu

SEQ ID NO: 5807 - RNA, 21 nt, Artificial Sequence
  Description of Artificial Sequence: Synthetic oligonucleotide
uaagaguaauugccuaacauu

SEQ ID NO: 5808 - RNA, 21 nt, Artificial Sequence
  Description of Artificial Sequence: Synthetic oligonucleotide
guaauugccuaacuugauauu

SEQ ID NO: 5809 - RNA, 21 nt, Artificial Sequence
  Description of Artificial Sequence: Synthetic oligonucleotide
uaauugccuaacuugauuauu

SEQ ID NO: 5810 - RNA, 21 nt, Artificial Sequence
  Description of Artificial Sequence: Synthetic oligonucleotide
uuaaccaaacuuguggccauu

SEQ ID NO: 5811 - RNA, 21 nt, Artificial Sequence
  Description of Artificial Sequence: Synthetic oligonucleotide
gaaugaguaacuccugucauu

SEQ ID NO: 5812 - RNA, 21 nt, Artificial Sequence
  Description of Artificial Sequence: Synthetic oligonucleotide
uuuugacacauucuuagcauu

SEQ ID NO: 5813 - RNA, 21 nt, Artificial Sequence
  Description of Artificial Sequence: Synthetic oligonucleotide
uuugacacauucuuagcaauu

SEQ ID NO: 5814 - RNA, 21 nt, Artificial Sequence
  Description of Artificial Sequence: Synthetic oligonucleotide
uugacacauucuuagcacauu

SEQ ID NO: 5815 - RNA, 21 nt, Artificial Sequence
  Description of Artificial Sequence: Synthetic oligonucleotide
acacauucuuagcacugaauu

SEQ ID NO: 5816 - RNA, 21 nt, Artificial Sequence
  Description of Artificial Sequence: Synthetic oligonucleotide
acauucuuagcacugaacauu

SEQ ID NO: 5817 - RNA, 21 nt, Artificial Sequence
  Description of Artificial Sequence: Synthetic oligonucleotide
gcuacuuugaagggaacaauu

SEQ ID NO: 5818 - RNA, 21 nt, Artificial Sequence
  Description of Artificial Sequence: Synthetic oligonucleotide
agugucacuuucugaguaauu

SEQ ID NO: 5819 - RNA, 21 nt, Artificial Sequence
  Description of Artificial Sequence: Synthetic oligonucleotide
gugucacuuucugaguacauu

SEQ ID NO: 5820 - RNA, 21 nt, Artificial Sequence
  Description of Artificial Sequence: Synthetic oligonucleotide
ucaccugcauagucacucauu

SEQ ID NO: 5821 - RNA, 21 nt, Artificial Sequence
  Description of Artificial Sequence: Synthetic oligonucleotide
ugcauagucacucuuuugauu

SEQ ID NO: 5822 - RNA, 21 nt, Artificial Sequence
  Description of Artificial Sequence: Synthetic oligonucleotide
uagucacucuuuugaugcauu

SEQ ID NO: 5823 - RNA, 21 nt, Artificial Sequence
  Description of Artificial Sequence: Synthetic oligonucleotide
guauagccacaguucaucauu

SEQ ID NO: 5824 - RNA, 21 nt, Artificial Sequence
  Description of Artificial Sequence: Synthetic oligonucleotide
uaaaucccacucgcucuuauu

SEQ ID NO: 5825 - RNA, 21 nt, Artificial Sequence
  Description of Artificial Sequence: Synthetic oligonucleotide
aaaucccacucgcucuuuauu

SEQ ID NO: 5826 - RNA, 21 nt, Artificial Sequence
  Description of Artificial Sequence: Synthetic oligonucleotide
auaacuacugcauaauauauu

SEQ ID NO: 5827 - RNA, 21 nt, Artificial Sequence
  Description of Artificial Sequence: Synthetic oligonucleotide
uaacuacugcauaauaugauu

SEQ ID NO: 5828 - RNA, 21 nt, Artificial Sequence
  Description of Artificial Sequence: Synthetic oligonucleotide
aacuacugcauaauauggauu

SEQ ID NO: 5829 - RNA, 21 nt, Artificial Sequence
  Description of Artificial Sequence: Synthetic oligonucleotide
ugcauaauauggauacgcauu

SEQ ID NO: 5830 - RNA, 21 nt, Artificial Sequence
  Description of Artificial Sequence: Synthetic oligonucleotide
uaauauggauacgccuuaauu

SEQ ID NO: 5831 - RNA, 21 nt, Artificial Sequence
  Description of Artificial Sequence: Synthetic oligonucleotide
aauauggauacgccuuauauu

SEQ ID NO: 5832 - RNA, 21 nt, Artificial Sequence
  Description of Artificial Sequence: Synthetic oligonucleotide
uauggauacgccuuauuuauu

SEQ ID NO: 5833 - RNA, 21 nt, Artificial Sequence
  Description of Artificial Sequence: Synthetic oligonucleotide
uggauacgccuuauuugaauu

SEQ ID NO: 5834 - RNA, 21 nt, Artificial Sequence
  Description of Artificial Sequence: Synthetic oligonucleotide
ggauacgccuuauuugauauu

SEQ ID NO: 5835 - RNA, 21 nt, Artificial Sequence
  Description of Artificial Sequence: Synthetic oligonucleotide
gauacgccuuauuugauuauu

SEQ ID NO: 5836 - RNA, 21 nt, Artificial Sequence
  Description of Artificial Sequence: Synthetic oligonucleotide
uacgccuuauuugauuuaauu

SEQ ID NO: 5837 - RNA, 21 nt, Artificial Sequence
  Description of Artificial Sequence: Synthetic oligonucleotide
acgccuuauuugauuuaaauu

SEQ ID NO: 5838 - RNA, 21 nt, Artificial Sequence
  Description of Artificial Sequence: Synthetic oligonucleotide
cgccuuauuugauuuaacauu

SEQ ID NO: 5839 - RNA, 21 nt, Artificial Sequence
  Description of Artificial Sequence: Synthetic oligonucleotide
cuuauuugauuuaacuagauu

SEQ ID NO: 5840 - RNA, 21 nt, Artificial Sequence
  Description of Artificial Sequence: Synthetic oligonucleotide
ugauuuaacuaguucccuauu

SEQ ID NO: 5841 - RNA, 21 nt, Artificial Sequence
  Description of Artificial Sequence: Synthetic oligonucleotide
auuuaacuaguucccuaaauu

SEQ ID NO: 5842 - RNA, 21 nt, Artificial Sequence
  Description of Artificial Sequence: Synthetic oligonucleotide
uuaacuaguucccuaaugauu

SEQ ID NO: 5843 - RNA, 21 nt, Artificial Sequence
  Description of Artificial Sequence: Synthetic oligonucleotide
cuaguucccuaaugauggauu

SEQ ID NO: 5844 - RNA, 21 nt, Artificial Sequence
  Description of Artificial Sequence: Synthetic oligonucleotide
uaguucccuaaugauggaauu

SEQ ID NO: 5845 - RNA, 21 nt, Artificial Sequence
  Description of Artificial Sequence: Synthetic oligonucleotide
aguucccuaaugauggacauu

SEQ ID NO: 5846 - RNA, 21 nt, Artificial Sequence
  Description of Artificial Sequence: Synthetic oligonucleotide
uauuggcagcugugaacuguu

SEQ ID NO: 5847 - RNA, 21 nt, Artificial Sequence
  Description of Artificial Sequence: Synthetic oligonucleotide
ugaccuugucugaagugcuuu

SEQ ID NO: 5848 - RNA, 21 nt, Artificial Sequence
  Description of Artificial Sequence: Synthetic oligonucleotide
uauuccgcagugucucugguu

SEQ ID NO: 5849 - RNA, 21 nt, Artificial Sequence
  Description of Artificial Sequence: Synthetic oligonucleotide
uuggcagcaaauuccgcaguu

SEQ ID NO: 5850 - RNA, 21 nt, Artificial Sequence
  Description of Artificial Sequence: Synthetic oligonucleotide
ugucccuuaaaaacuggcuuu

SEQ ID NO: 5851 - RNA, 21 nt, Artificial Sequence
  Description of Artificial Sequence: Synthetic oligonucleotide
ugugucccuuaaaaacugguu

SEQ ID NO: 5852 - RNA, 21 nt, Artificial Sequence
  Description of Artificial Sequence: Synthetic oligonucleotide
uggugucccuuaaaaacuguu

SEQ ID NO: 5853 - RNA, 21 nt, Artificial Sequence
  Description of Artificial Sequence: Synthetic oligonucleotide
uucuggugucccuuaaaaauu

SEQ ID NO: 5854 - RNA, 21 nt, Artificial Sequence
  Description of Artificial Sequence: Synthetic oligonucleotide
ugcucuggugucccuuaaauu

SEQ ID NO: 5855 - RNA, 21 nt, Artificial Sequence
  Description of Artificial Sequence: Synthetic oligonucleotide
uauagaaucagagcaggcuuu

SEQ ID NO: 5856 - RNA, 21 nt, Artificial Sequence
  Description of Artificial Sequence: Synthetic oligonucleotide
uguuaggcaauuacucuuauu

SEQ ID NO: 5857 - RNA, 21 nt, Artificial Sequence
  Description of Artificial Sequence: Synthetic oligonucleotide
uaucaaguuaggcaauuacuu

SEQ ID NO: 5858 - RNA, 21 nt, Artificial Sequence
  Description of Artificial Sequence: Synthetic oligonucleotide
uaaucaaguuaggcaauuauu

SEQ ID NO: 5859 - RNA, 21 nt, Artificial Sequence
  Description of Artificial Sequence: Synthetic oligonucleotide
uggccacaaguuugguuaauu

SEQ ID NO: 5860 - RNA, 21 nt, Artificial Sequence
  Description of Artificial Sequence: Synthetic oligonucleotide
ugacaggaguuacucauucuu

SEQ ID NO: 5861 - RNA, 21 nt, Artificial Sequence
  Description of Artificial Sequence: Synthetic oligonucleotide
ugcuaagaaugugucaaaauu

SEQ ID NO: 5862 - RNA, 21 nt, Artificial Sequence
  Description of Artificial Sequence: Synthetic oligonucleotide
uugcuaagaaugugucaaauu

SEQ ID NO: 5863 - RNA, 21 nt, Artificial Sequence
  Description of Artificial Sequence: Synthetic oligonucleotide
ugugcuaagaaugugucaauu

SEQ ID NO: 5864 - RNA, 21 nt, Artificial Sequence
  Description of Artificial Sequence: Synthetic oligonucleotide
uucagugcuaagaauguguuu

SEQ ID NO: 5865 - RNA, 21 nt, Artificial Sequence
  Description of Artificial Sequence: Synthetic oligonucleotide
uguucagugcuaagaauguuu

SEQ ID NO: 5866 - RNA, 21 nt, Artificial Sequence
  Description of Artificial Sequence: Synthetic oligonucleotide
uuguucccuucaaaguagcuu

SEQ ID NO: 5867 - RNA, 21 nt, Artificial Sequence
  Description of Artificial Sequence: Synthetic oligonucleotide
uuacucagaaagugacacuuu

SEQ ID NO: 5868 - RNA, 21 nt, Artificial Sequence
  Description of Artificial Sequence: Synthetic oligonucleotide
uguacucagaaagugacacuu

SEQ ID NO: 5869 - RNA, 21 nt, Artificial Sequence
  Description of Artificial Sequence: Synthetic oligonucleotide
ugagugacuaugcaggugauu

SEQ ID NO: 5870 - RNA, 21 nt, Artificial Sequence
  Description of Artificial Sequence: Synthetic oligonucleotide
ucaaaagagugacuaugcauu

SEQ ID NO: 5871 - RNA, 21 nt, Artificial Sequence
  Description of Artificial Sequence: Synthetic oligonucleotide
ugcaucaaaagagugacuauu

SEQ ID NO: 5872 - RNA, 21 nt, Artificial Sequence
  Description of Artificial Sequence: Synthetic oligonucleotide
ugaugaacuguggcuauacuu

SEQ ID NO: 5873 - RNA, 21 nt, Artificial Sequence
  Description of Artificial Sequence: Synthetic oligonucleotide
uaagagcgagugggauuuauu

SEQ ID NO: 5874 - RNA, 21 nt, Artificial Sequence
  Description of Artificial Sequence: Synthetic oligonucleotide
uaaagagcgagugggauuuuu

SEQ ID NO: 5875 - RNA, 21 nt, Artificial Sequence
  Description of Artificial Sequence: Synthetic oligonucleotide
uauauuaugcaguaguuauuu

SEQ ID NO: 5876 - RNA, 21 nt, Artificial Sequence
  Description of Artificial Sequence: Synthetic oligonucleotide
ucauauuaugcaguaguuauu

SEQ ID NO: 5877 - RNA, 21 nt, Artificial Sequence
  Description of Artificial Sequence: Synthetic oligonucleotide
uccauauuaugcaguaguuuu

SEQ ID NO: 5878 - RNA, 21 nt, Artificial Sequence
  Description of Artificial Sequence: Synthetic oligonucleotide
ugcguauccauauuaugcauu

SEQ ID NO: 5879 - RNA, 21 nt, Artificial Sequence
  Description of Artificial Sequence: Synthetic oligonucleotide
uuaaggcguauccauauuauu

SEQ ID NO: 5880 - RNA, 21 nt, Artificial Sequence
  Description of Artificial Sequence: Synthetic oligonucleotide
uauaaggcguauccauauuuu

SEQ ID NO: 5881 - RNA, 21 nt, Artificial Sequence
  Description of Artificial Sequence: Synthetic oligonucleotide
uaaauaaggcguauccauauu

SEQ ID NO: 5882 - RNA, 21 nt, Artificial Sequence
  Description of Artificial Sequence: Synthetic oligonucleotide
uucaaauaaggcguauccauu

SEQ ID NO: 5883 - RNA, 21 nt, Artificial Sequence
  Description of Artificial Sequence: Synthetic oligonucleotide
uaucaaauaaggcguauccuu

SEQ ID NO: 5884 - RNA, 21 nt, Artificial Sequence
  Description of Artificial Sequence: Synthetic oligonucleotide
uaaucaaauaaggcguaucuu

SEQ ID NO: 5885 - RNA, 21 nt, Artificial Sequence
  Description of Artificial Sequence: Synthetic oligonucleotide
uuaaaucaaauaaggcguauu

SEQ ID NO: 5886 - RNA, 21 nt, Artificial Sequence
  Description of Artificial Sequence: Synthetic oligonucleotide
uuuaaaucaaauaaggcguuu

SEQ ID NO: 5887 - RNA, 21 nt, Artificial Sequence
  Description of Artificial Sequence: Synthetic oligonucleotide
uguuaaaucaaauaaggcguu

SEQ ID NO: 5888 - RNA, 21 nt, Artificial Sequence
  Description of Artificial Sequence: Synthetic oligonucleotide
ucuaguuaaaucaaauaaguu

SEQ ID NO: 5889 - RNA, 21 nt, Artificial Sequence
  Description of Artificial Sequence: Synthetic oligonucleotide
uagggaacuaguuaaaucauu

SEQ ID NO: 5890 - RNA, 21 nt, Artificial Sequence
  Description of Artificial Sequence: Synthetic oligonucleotide
uuuagggaacuaguuaaauuu

SEQ ID NO: 5891 - RNA, 21 nt, Artificial Sequence
  Description of Artificial Sequence: Synthetic oligonucleotide
ucauuagggaacuaguuaauu

SEQ ID NO: 5892 - RNA, 21 nt, Artificial Sequence
  Description of Artificial Sequence: Synthetic oligonucleotide
uccaucauuagggaacuaguu

SEQ ID NO: 5893 - RNA, 21 nt, Artificial Sequence
  Description of Artificial Sequence: Synthetic oligonucleotide
uuccaucauuagggaacuauu

SEQ ID NO: 5894 - RNA, 21 nt, Artificial Sequence
  Description of Artificial Sequence: Synthetic oligonucleotide
uguccaucauuagggaacuuu

SEQ ID NO: 5895 - RNA, 21 nt, Artificial Sequence
  Description of Artificial Sequence: Synthetic oligonucleotide
caguucacagcugccaauauu

SEQ ID NO: 5896 - RNA, 21 nt, Artificial Sequence
  Description of Artificial Sequence: Synthetic oligonucleotide
agcacuucagacaaggucauu

SEQ ID NO: 5897 - RNA, 21 nt, Artificial Sequence
  Description of Artificial Sequence: Synthetic oligonucleotide
ccagagacacugcggaauauu

SEQ ID NO: 5898 - RNA, 21 nt, Artificial Sequence
  Description of Artificial Sequence: Synthetic oligonucleotide
cugcggaauuugcugccaauu

SEQ ID NO: 5899 - RNA, 21 nt, Artificial Sequence
  Description of Artificial Sequence: Synthetic oligonucleotide
agccaguuuuuaagggacauu

SEQ ID NO: 5900 - RNA, 21 nt, Artificial Sequence
  Description of Artificial Sequence: Synthetic oligonucleotide
ccaguuuuuaagggacacauu

SEQ ID NO: 5901 - RNA, 21 nt, Artificial Sequence
  Description of Artificial Sequence: Synthetic oligonucleotide
caguuuuuaagggacaccauu

SEQ ID NO: 5902 - RNA, 21 nt, Artificial Sequence
  Description of Artificial Sequence: Synthetic oligonucleotide
uuuuuaagggacaccagaauu

SEQ ID NO: 5903 - RNA, 21 nt, Artificial Sequence
  Description of Artificial Sequence: Synthetic oligonucleotide
uuuaagggacaccagagcauu

SEQ ID NO: 5904 - RNA, 21 nt, Artificial Sequence
  Description of Artificial Sequence: Synthetic oligonucleotide
agccugcucugauucuauauu

SEQ ID NO: 5905 - RNA, 21 nt, Artificial Sequence
  Description of Artificial Sequence: Synthetic oligonucleotide
uaagaguaauugccuaacauu

SEQ ID NO: 5906 - RNA, 21 nt, Artificial Sequence
  Description of Artificial Sequence: Synthetic oligonucleotide
guaauugccuaacuugauauu

SEQ ID NO: 5907 - RNA, 21 nt, Artificial Sequence
  Description of Artificial Sequence: Synthetic oligonucleotide
uaauugccuaacuugauuauu

SEQ ID NO: 5908 - RNA, 21 nt, Artificial Sequence
  Description of Artificial Sequence: Synthetic oligonucleotide
uuaaccaaacuuguggccauu

SEQ ID NO: 5909 - RNA, 21 nt, Artificial Sequence
  Description of Artificial Sequence: Synthetic oligonucleotide
gaaugaguaacuccugucauu

SEQ ID NO: 5910 - RNA, 21 nt, Artificial Sequence
  Description of Artificial Sequence: Synthetic oligonucleotide
uuuugacacauucuuagcauu

SEQ ID NO: 5911 - RNA, 21 nt, Artificial Sequence
  Description of Artificial Sequence: Synthetic oligonucleotide
uuugacacauucuuagcaauu

SEQ ID NO: 5912 - RNA, 21 nt, Artificial Sequence
  Description of Artificial Sequence: Synthetic oligonucleotide
uugacacauucuuagcacauu

SEQ ID NO: 5913 - RNA, 21 nt, Artificial Sequence
  Description of Artificial Sequence: Synthetic oligonucleotide
acacauucuuagcacugaauu

SEQ ID NO: 5914 - RNA, 21 nt, Artificial Sequence
  Description of Artificial Sequence: Synthetic oligonucleotide
acauucuuagcacugaacauu

SEQ ID NO: 5915 - RNA, 21 nt, Artificial Sequence
  Description of Artificial Sequence: Synthetic oligonucleotide
gcuacuuugaagggaacaauu

SEQ ID NO: 5916 - RNA, 21 nt, Artificial Sequence
  Description of Artificial Sequence: Synthetic oligonucleotide
agugucacuuucugaguaauu

SEQ ID NO: 5917 - RNA, 21 nt, Artificial Sequence
  Description of Artificial Sequence: Synthetic oligonucleotide
gugucacuuucugaguacauu

SEQ ID NO: 5918 - RNA, 21 nt, Artificial Sequence
  Description of Artificial Sequence: Synthetic oligonucleotide
ucaccugcauagucacucauu

SEQ ID NO: 5919 - RNA, 21 nt, Artificial Sequence
  Description of Artificial Sequence: Synthetic oligonucleotide
ugcauagucacucuuuugauu

SEQ ID NO: 5920 - RNA, 21 nt, Artificial Sequence
  Description of Artificial Sequence: Synthetic oligonucleotide
uagucacucuuuugaugcauu

SEQ ID NO: 5921 - RNA, 21 nt, Artificial Sequence
  Description of Artificial Sequence: Synthetic oligonucleotide
guauagccacaguucaucauu

SEQ ID NO: 5922 - RNA, 21 nt, Artificial Sequence
  Description of Artificial Sequence: Synthetic oligonucleotide
uaaaucccacucgcucuuauu

SEQ ID NO: 5923 - RNA, 21 nt, Artificial Sequence
  Description of Artificial Sequence: Synthetic oligonucleotide
aaaucccacucgcucuuuauu

SEQ ID NO: 5924 - RNA, 21 nt, Artificial Sequence
  Description of Artificial Sequence: Synthetic oligonucleotide
auaacuacugcauaauauauu

SEQ ID NO: 5925 - RNA, 21 nt, Artificial Sequence
  Description of Artificial Sequence: Synthetic oligonucleotide
uaacuacugcauaauaugauu

SEQ ID NO: 5926 - RNA, 21 nt, Artificial Sequence
  Description of Artificial Sequence: Synthetic oligonucleotide
aacuacugcauaauauggauu

SEQ ID NO: 5927 - RNA, 21 nt, Artificial Sequence
  Description of Artificial Sequence: Synthetic oligonucleotide
ugcauaauauggauacgcauu

SEQ ID NO: 5928 - RNA, 21 nt, Artificial Sequence
  Description of Artificial Sequence: Synthetic oligonucleotide
uaauauggauacgccuuaauu

SEQ ID NO: 5929 - RNA, 21 nt, Artificial Sequence
  Description of Artificial Sequence: Synthetic oligonucleotide
aauauggauacgccuuauauu

SEQ ID NO: 5930 - RNA, 21 nt, Artificial Sequence
  Description of Artificial Sequence: Synthetic oligonucleotide
uauggauacgccuuauuuauu

SEQ ID NO: 5931 - RNA, 21 nt, Artificial Sequence
  Description of Artificial Sequence: Synthetic oligonucleotide
uggauacgccuuauuugaauu

SEQ ID NO: 5932 - RNA, 21 nt, Artificial Sequence
  Description of Artificial Sequence: Synthetic oligonucleotide
ggauacgccuuauuugauauu

SEQ ID NO: 5933 - RNA, 21 nt, Artificial Sequence
  Description of Artificial Sequence: Synthetic oligonucleotide
gauacgccuuauuugauuauu

SEQ ID NO: 5934 - RNA, 21 nt, Artificial Sequence
  Description of Artificial Sequence: Synthetic oligonucleotide
uacgccuuauuugauuuaauu

SEQ ID NO: 5935 - RNA, 21 nt, Artificial Sequence
  Description of Artificial Sequence: Synthetic oligonucleotide
acgccuuauuugauuuaaauu

SEQ ID NO: 5936 - RNA, 21 nt, Artificial Sequence
  Description of Artificial Sequence: Synthetic oligonucleotide
cgccuuauuugauuuaacauu

SEQ ID NO: 5937 - RNA, 21 nt, Artificial Sequence
  Description of Artificial Sequence: Synthetic oligonucleotide
cuuauuugauuuaacuagauu

SEQ ID NO: 5938 - RNA, 21 nt, Artificial Sequence
  Description of Artificial Sequence: Synthetic oligonucleotide
ugauuuaacuaguucccuauu

SEQ ID NO: 5939 - RNA, 21 nt, Artificial Sequence
  Description of Artificial Sequence: Synthetic oligonucleotide
auuuaacuaguucccuaaauu

SEQ ID NO: 5940 - RNA, 21 nt, Artificial Sequence
  Description of Artificial Sequence: Synthetic oligonucleotide
uuaacuaguucccuaaugauu

SEQ ID NO: 5941 - RNA, 21 nt, Artificial Sequence
  Description of Artificial Sequence: Synthetic oligonucleotide
cuaguucccuaaugauggauu

SEQ ID NO: 5942 - RNA, 21 nt, Artificial Sequence
  Description of Artificial Sequence: Synthetic oligonucleotide
uaguucccuaaugauggaauu

SEQ ID NO: 5943 - RNA, 21 nt, Artificial Sequence
  Description of Artificial Sequence: Synthetic oligonucleotide
aguucccuaaugauggacauu

SEQ ID NO: 5944 - RNA, 21 nt, Artificial Sequence
  Description of Artificial Sequence: Synthetic oligonucleotide
caacacucuuucucgacaauu

SEQ ID NO: 5945 - RNA, 21 nt, Artificial Sequence
  Description of Artificial Sequence: Synthetic oligonucleotide
caacacucuuucucgacaauu

SEQ ID NO: 5946 - RNA, 21 nt, Artificial Sequence
  Description of Artificial Sequence: Synthetic oligonucleotide
caacacucuuucucgacaauu

SEQ ID NO: 5947 - RNA, 21 nt, Artificial Sequence
  Description of Artificial Sequence: Synthetic oligonucleotide
uaagaguaauugccuaacauu

SEQ ID NO: 5948 - RNA, 21 nt, Artificial Sequence
  Description of Artificial Sequence: Synthetic oligonucleotide
guaauugccuaacuugauauu

SEQ ID NO: 5949 - RNA, 21 nt, Artificial Sequence
  Description of Artificial Sequence: Synthetic oligonucleotide
uuugacacauucuuagcaauu

SEQ ID NO: 5950 - RNA, 21 nt, Artificial Sequence
  Description of Artificial Sequence: Synthetic oligonucleotide
caguuuuuaagggacaccauu

SEQ ID NO: 5951 - RNA, 21 nt, Artificial Sequence
  Description of Artificial Sequence: Synthetic oligonucleotide
uuuuuaagggacaccagaauu

SEQ ID NO: 5952 - RNA, 21 nt, Artificial Sequence
  Description of Artificial Sequence: Synthetic oligonucleotide
uuuugacacauucuuagcauu

SEQ ID NO: 5953 - RNA, 21 nt, Artificial Sequence
  Description of Artificial Sequence: Synthetic oligonucleotide
uugacacauucuuagcacauu

SEQ ID NO: 5954 - RNA, 21 nt, Artificial Sequence
  Description of Artificial Sequence: Synthetic oligonucleotide
acauucuuagcacugaacauu

SEQ ID NO: 5955 - RNA, 21 nt, Artificial Sequence
  Description of Artificial Sequence: Synthetic oligonucleotide
ugcauagucacucuuuugauu

SEQ ID NO: 5956 - RNA, 21 nt, Artificial Sequence
  Description of Artificial Sequence: Synthetic oligonucleotide
aacuacugcauaauauggauu

SEQ ID NO: 5957 - RNA, 21 nt, Artificial Sequence
  Description of Artificial Sequence: Synthetic oligonucleotide
uugucgagaaagaguguuguu

SEQ ID NO: 5958 - RNA, 21 nt, Artificial Sequence
  Description of Artificial Sequence: Synthetic oligonucleotide
uugucgagaaagaguguuguu

SEQ ID NO: 5959 - RNA, 21 nt, Artificial Sequence
  Description of Artificial Sequence: Synthetic oligonucleotide
uugucgagaaagaguguuguu

SEQ ID NO: 5960 - RNA, 21 nt, Artificial Sequence
  Description of Artificial Sequence: Synthetic oligonucleotide
uguuaggcaauuacucuuauu

SEQ ID NO: 5961 - RNA, 21 nt, Artificial Sequence
  Description of Artificial Sequence: Synthetic oligonucleotide
uaucaaguuaggcaauuacuu

SEQ ID NO: 5962 - RNA, 21 nt, Artificial Sequence
  Description of Artificial Sequence: Synthetic oligonucleotide
uugcuaagaaugugucaaauu

SEQ ID NO: 5963 - RNA, 21 nt, Artificial Sequence
  Description of Artificial Sequence: Synthetic oligonucleotide
uggugucccuuaaaaacuguu

SEQ ID NO: 5964 - RNA, 21 nt, Artificial Sequence
  Description of Artificial Sequence: Synthetic oligonucleotide
uucuggugucccuuaaaaauu

SEQ ID NO: 5965 - RNA, 21 nt, Artificial Sequence
  Description of Artificial Sequence: Synthetic oligonucleotide
ugcuaagaaugugucaaaauu

SEQ ID NO: 5966 - RNA, 21 nt, Artificial Sequence
  Description of Artificial Sequence: Synthetic oligonucleotide
ugugcuaagaaugugucaauu

SEQ ID NO: 5967 - RNA, 21 nt, Artificial Sequence
  Description of Artificial Sequence: Synthetic oligonucleotide
uguucagugcuaagaauguuu

SEQ ID NO: 5968 - RNA, 21 nt, Artificial Sequence
  Description of Artificial Sequence: Synthetic oligonucleotide
ucaaaagagugacuaugcauu

SEQ ID NO: 5969 - RNA, 21 nt, Artificial Sequence
  Description of Artificial Sequence: Synthetic oligonucleotide
uccauauuaugcaguaguuuu

SEQ ID NO: 5970 - RNA, 21 nt, Artificial Sequence
  Description of Artificial Sequence: Synthetic oligonucleotide
caacacucuuucucgacaauu

SEQ ID NO: 5971 - RNA, 21 nt, Artificial Sequence
  Description of Artificial Sequence: Synthetic oligonucleotide
caacacucuuucucgacaauu

SEQ ID NO: 5972 - RNA, 21 nt, Artificial Sequence
  Description of Artificial Sequence: Synthetic oligonucleotide
uaagaguaauugccuaacauu

SEQ ID NO: 5973 - RNA, 21 nt, Artificial Sequence
  Description of Artificial Sequence: Synthetic oligonucleotide
guaauugccuaacuugauauu

SEQ ID NO: 5974 - RNA, 21 nt, Artificial Sequence
  Description of Artificial Sequence: Synthetic oligonucleotide
uuugacacauucuuagcaauu

SEQ ID NO: 5975 - RNA, 21 nt, Artificial Sequence
  Description of Artificial Sequence: Synthetic oligonucleotide
caguuuuuaagggacaccauu

SEQ ID NO: 5976 - RNA, 21 nt, Artificial Sequence
  Description of Artificial Sequence: Synthetic oligonucleotide
uuuuuaagggacaccagaauu

SEQ ID NO: 5977 - RNA, 21 nt, Artificial Sequence
  Description of Artificial Sequence: Synthetic oligonucleotide
uuuugacacauucuuagcauu

SEQ ID NO: 5978 - RNA, 21 nt, Artificial Sequence
  Description of Artificial Sequence: Synthetic oligonucleotide
uugacacauucuuagcacauu

SEQ ID NO: 5979 - RNA, 21 nt, Artificial Sequence
  Description of Artificial Sequence: Synthetic oligonucleotide
acauucuuagcacugaacauu

SEQ ID NO: 5980 - RNA, 21 nt, Artificial Sequence
  Description of Artificial Sequence: Synthetic oligonucleotide
ugcauagucacucuuuugauu

SEQ ID NO: 5981 - RNA, 21 nt, Artificial Sequence
  Description of Artificial Sequence: Synthetic oligonucleotide
aacuacugcauaauauggauu

SEQ ID NO: 5982 - RNA, 19 nt, Artificial Sequence
  Description of Artificial Sequence: Synthetic oligonucleotide
caacacucuuucucgacaa

SEQ ID NO: 5983 - RNA, 19 nt, Artificial Sequence
  Description of Artificial Sequence: Synthetic oligonucleotide
caacacucuuucucgacaa

SEQ ID NO: 5984 - RNA, 19 nt, Artificial Sequence
  Description of Artificial Sequence: Synthetic oligonucleotide
uaagaguaauugccuaaca

SEQ ID NO: 5985 - RNA, 19 nt, Artificial Sequence
  Description of Artificial Sequence: Synthetic oligonucleotide
guaauugccuaacuugaua

SEQ ID NO: 5986 - RNA, 19 nt, Artificial Sequence
  Description of Artificial Sequence: Synthetic oligonucleotide
uuugacacauucuuagcaa

SEQ ID NO: 5987 - RNA, 19 nt, Artificial Sequence
  Description of Artificial Sequence: Synthetic oligonucleotide
uuuuuaagggacaccagaa

SEQ ID NO: 5988 - RNA, 19 nt, Artificial Sequence
  Description of Artificial Sequence: Synthetic oligonucleotide
uugacacauucuuagcaca

SEQ ID NO: 5989 - RNA, 19 nt, Artificial Sequence
  Description of Artificial Sequence: Synthetic oligonucleotide
acauucuuagcacugaaca

SEQ ID NO: 5990 - RNA, 21 nt, Artificial Sequence
  Description of Artificial Sequence: Synthetic oligonucleotide
uugucgagaaagaguguuguu

SEQ ID NO: 5991 - RNA, 21 nt, Artificial Sequence
  Description of Artificial Sequence: Synthetic oligonucleotide
uugucgagaaagaguguuguu

SEQ ID NO: 5992 - RNA, 21 nt, Artificial Sequence
  Description of Artificial Sequence: Synthetic oligonucleotide
uugucgagaaagaguguuguu

SEQ ID NO: 5993 - RNA, 21 nt, Artificial Sequence
  Description of Artificial Sequence: Synthetic oligonucleotide
uugucgagaaagaguguuguu

SEQ ID NO: 5994 - RNA, 21 nt, Artificial Sequence
  Description of Artificial Sequence: Synthetic oligonucleotide
uguuaggcaauuacucuuauu

SEQ ID NO: 5995 - RNA, 21 nt, Artificial Sequence
  Description of Artificial Sequence: Synthetic oligonucleotide
uaucaaguuaggcaauuacuu

SEQ ID NO: 5996 - RNA, 21 nt, Artificial Sequence
  Description of Artificial Sequence: Synthetic oligonucleotide
uugcuaagaaugugucaaauu

SEQ ID NO: 5997 - RNA, 21 nt, Artificial Sequence
  Description of Artificial Sequence: Synthetic oligonucleotide
uggugucccuuaaaaacuguu

SEQ ID NO: 5998 - RNA, 21 nt, Artificial Sequence
  Description of Artificial Sequence: Synthetic oligonucleotide
uucuggugucccuuaaaaauu

SEQ ID NO: 5999 - RNA, 21 nt, Artificial Sequence
  Description of Artificial Sequence: Synthetic oligonucleotide
ugcuaagaaugugucaaaauu

SEQ ID NO: 6000 - RNA, 21 nt, Artificial Sequence
  Description of Artificial Sequence: Synthetic oligonucleotide
ugugcuaagaaugugucaauu

SEQ ID NO: 6001 - RNA, 21 nt, Artificial Sequence
  Description of Artificial Sequence: Synthetic oligonucleotide
uguucagugcuaagaauguuu

SEQ ID NO: 6002 - RNA, 21 nt, Artificial Sequence
  Description of Artificial Sequence: Synthetic oligonucleotide
ucaaaagagugacuaugcauu

SEQ ID NO: 6003 - RNA, 21 nt, Artificial Sequence
  Description of Artificial Sequence: Synthetic oligonucleotide
uccauauuaugcaguaguuuu

SEQ ID NO: 6004 - RNA, 19 nt, Artificial Sequence
  Description of Artificial Sequence: Synthetic oligonucleotide
uugucgagaaagaguguug

SEQ ID NO: 6005 - RNA, 19 nt, Artificial Sequence
  Description of Artificial Sequence: Synthetic oligonucleotide
uugucgagaaagaguguug

SEQ ID NO: 6006 - RNA, 19 nt, Artificial Sequence
  Description of Artificial Sequence: Synthetic oligonucleotide
uugucgagaaagaguguug

SEQ ID NO: 6007 - RNA, 19 nt, Artificial Sequence
  Description of Artificial Sequence: Synthetic oligonucleotide
uugucgagaaagaguguug

SEQ ID NO: 6008 - RNA, 19 nt, Artificial Sequence
  Description of Artificial Sequence: Synthetic oligonucleotide
uguuaggcaauuacucuua

SEQ ID NO: 6009 - RNA, 19 nt, Artificial Sequence
  Description of Artificial Sequence: Synthetic oligonucleotide
uaucaaguuaggcaauuac

SEQ ID NO: 6010 - RNA, 19 nt, Artificial Sequence
  Description of Artificial Sequence: Synthetic oligonucleotide
uugcuaagaaugugucaaa

SEQ ID NO: 6011 - RNA, 19 nt, Artificial Sequence
  Description of Artificial Sequence: Synthetic oligonucleotide
uucuggugucccuuaaaaa

SEQ ID NO: 6012 - RNA, 19 nt, Artificial Sequence
  Description of Artificial Sequence: Synthetic oligonucleotide
ugugcuaagaaugugucaa

SEQ ID NO: 6013 - RNA, 19 nt, Artificial Sequence
  Description of Artificial Sequence: Synthetic oligonucleotide
uguucagugcuaagaaugu

SEQ ID NO: 6014 - DNA, 2916 bp, Homo sapiens
actctgcagcctgggctctgtgagactgaggtggcggtcagccggagtgagtgttggggtcctggggcacctgccttacatggcttgtttatgaacattaaagggaagaagttgaagcttgaggagcgaggatggcagtcaacaaaggcctcaccttgctggatggagacctccctgagcaggagaatgtgctgcagcgggtcctgcagctgccggtggtgagtggcacctgcgaatgcttccagaagacctacaccagcactaaggaagcccaccccctggtggcctctgtgtgcaatgcctatgagaagggcgtgcagagcgccagtagcttggctgcctggagcatggagccggtggtccgcaggctgtccacccagttcacagctgccaatgagctggcctgccgaggcttggaccacctggaggaaaagatccccgccctccagtacccccctgaaaagattgcttctgagctgaaggacaccatctccacccgcctccgcagtgccagaaacagcatcagcgttcccatcgcgagcacttcagacaaggtcctgggggccgctttggccgggtgcgagcttgcctggggggtggccagagacactgcggaatttgctgccaacactcgagctggccgactggcttctggaggggccgacttggccttgggcagcattgagaaggtggtggagtacctcctccctccagacaaggaagagtcagcccctgctcctggacaccagcaagcccagaagtctcccaaggccaagccaagcctcttgagcagggttggggctctgaccaacaccctctctcgatacaccgtgcagaccatggcccgggccctggagcagggccacaccgtggccatgtggatcccaggcgtggtgcccctgagcagcctggcccagtggggtgcctcagtggccatgcaggcggtgtcccggcggaggagcgaagtgcgggtaccctggctgcacagcctcgcagccgcccaggaggaggatcatgaggaccagacagacacggagggagaggacacggaggaggaggaagaattggagactgaggagaacaagttcagtgaggtagcagccctgccaggccctcgaggcctcctgggtggtgtggcacataccctgcagaagaccctccagaccaccatctcggctgtgacatgggcacctgcagctgtgctgggcatggcagggagggtgctgcacctcacaccagcccctgctgtctcctcaaccaaggggagggccatgtccctatcagatgccctgaagggcgttactgacaacgtggtggacacagtggtgcattacgtgccgctccccaggctgtcgctgatggagcccgagagcgaattccgggacatcgacaacccaccagccgaggtcgagcgccgggaggcggagcgcagagcgtctggggcgccgtccgccggcccggagcccgccccgcgtctcgcacagccccgccgcagcctgcgcagcgcgcagagccccggcgcgccccccggcccgggcctggaggacgaagtcgccacgcccgcagcgccgcgcccgggcttcccggccgtgccccgcgagaagccaaagcgcagggtcagcgacagcttcttccggcccagcgtcatggagcccatcctgggccgcacgcattacagccagctgcgcaagaagagctgagtcgccgcaccagccgccgcgccccgggccggcgggtttctctaacaaataaacagaacccgcactgcccaggcgagcgttgccactttcaaagtggtcccctggggagctcagcctcatcctgatgatgctgccaaggcgcactttttatttttattttatttttattttttttttagcatccttttggggcttcactctcagagccagtttttaagggacaccagagccgcagcctgctctgattctatggcttggttgttactataagagtaattgcctaacttgatttttcatctctttaaccaaacttgtggccaaaagatatttgaccgtttccaaaattcagattctgcctctgcggataaatatttgccacgaatgagtaactcctgtcaccactctgaaggtccagacagaaggttttgacacattcttagcactgaactcctctgtgatctaggatgatctgttccccctctgatgaacatcctctgatgatctaggctcccagcaggctactttgaagggaacaatcagatgcaaaagctcttgggtgtttatttaaaatactagtgtcactttctgagtacccgccgcttcacaggctgagtccaggcctgtgtgctttgtagagccagctgcttgctcacagccacatttccatttgcatcattactgccttcacctgcatagtcactcttttgatgctggggaaccaaaatggtgatgatatatagactttatgtatagccacagttcatccccaaccctagtcttcgaaatgttaatatttgataaatctagaaaatgcattcatacaattacagaattcaaatattgcaaaaggatgtgtgtctttctccccgagctcccctgttccccttcattgaaaaccaccacggtgccatctcttgtgtatgcagggctatgcacctgcaggcacgtgtgtatgcactccccgcttgtgtttacacaagctgtggggtgttacgcatgcctgcttttttcacttaataatacagcttggagagatttttgtatcacattataaatcccactcgctctttttgatggccacataataactactgcataatatggatacgccttatttgatttaactagttccctaatgatggacttttaagttgtttcctttttttttcttttttgctactgcaaacgatgctataataaatgtccttatcaaaaa

SEQ ID NO: 6015 - RNA, 21 nt, Artificial Sequence
  Description of Artificial Sequence: Synthetic oligonucleotide
  modified_base (1)..(1): 2' fluoro-modified a, c, u, g, or other
  misc_feature (1)..(2): Phosphorothioate linkage
  modified_base (2)..(2): 2' O-methyl modified a, c, u, g, or other
  misc_feature (2)..(3): Phosphorothioate linkage
  modified_base (3)..(3): 2' fluoro-modified a, c, u, g, or other
  modified_base (4)..(4): 2' O-methyl modified a, c, u, g, or other
  modified_base (5)..(5): 2' fluoro-modified a, c, u, g, or other
  modified_base (6)..(6): 2' O-methyl modified a, c, u, g, or other
  modified_base (7)..(7): 2' fluoro-modified a, c, u, g, or other
  modified_base (8)..(8): 2' fluoro-modified a, c, u, g, or other
  modified_base (9)..(9): 2' fluoro-modified a, c, u, g, or other
  modified_base (10)..(10): 2' O-methyl modified a, c, u, g, or other
  modified_base (11)..(11): 2' fluoro-modified a, c, u, g, or other
  modified_base (12)..(12): 2' O-methyl modified a, c, u, g, or other
  modified_base (13)..(13): 2' fluoro-modified a, c, u, g, or other
  modified_base (14)..(14): 2' O-methyl modified a, c, u, g, or other
  modified_base (15)..(15): 2' fluoro-modified a, c, u, g, or other
  modified_base (16)..(16): 2' O-methyl modified a, c, u, g, or other
  modified_base (17)..(17): 2' fluoro-modified a, c, u, g, or other
  modified_base (18)..(18): 2' O-methyl modified a, c, u, g, or other
  modified_base (19)..(19): 2' fluoro-modified a, c, u, g, or other
  misc_feature (19)..(20): Phosphorothioate linkage
  modified_base (20)..(20): 2' O-methyl modified a, c, u, g, or other
  misc_feature (20)..(21): Phosphorothioate linkage
  modified_base (21)..(21): 2' O-methyl modified a, c, u, g, or other
nnnnnnnnnnnnnnnnnnnnn

SEQ ID NO: 6016 - RNA, 21 nt, Artificial Sequence
  Description of Artificial Sequence: Synthetic oligonucleotide
  modified_base (1)..(1): 2' O-methyl modified a, c, u, g, or other
  misc_feature (1)..(2): Phosphorothioate linkage
  modified_base (2)..(2): 2' O-methyl modified a, c, u, g, or other
  misc_feature (2)..(3): Phosphorothioate linkage
  modified_base (3)..(3): 2' O-methyl modified a, c, u, g, or other
  modified_base (4)..(4): 2' O-methyl modified a, c, u, g, or other
  modified_base (5)..(5): 2' fluoro-modified a, c, u, g, or other
  modified_base (6)..(6): 2' O-methyl modified a, c, u, g, or other
  modified_base (7)..(7): 2' fluoro-modified a, c, u, g, or other
  modified_base (8)..(8): 2' fluoro-modified a, c, u, g, or other
  modified_base (9)..(9): 2' fluoro-modified a, c, u, g, or other
  modified_base (10)..(10): 2' O-methyl modified a, c, u, g, or other
  modified_base (11)..(11): 2' O-methyl modified a, c, u, g, or other
  modified_base (12)..(12): 2' O-methyl modified a, c, u, g, or other
  modified_base (13)..(13): 2' O-methyl modified a, c, u, g, or other
  modified_base (14)..(14): 2' O-methyl modified a, c, u, g, or other
  modified_base (15)..(15): 2' O-methyl modified a, c, u, g, or other
  modified_base (16)..(16): 2' O-methyl modified a, c, u, g, or other
  modified_base (17)..(17): 2' O-methyl modified a, c, u, g, or other
  modified_base (18)..(18): 2' O-methyl modified a, c, u, g, or other
  modified_base (19)..(19): 2' O-methyl modified a, c, u, g, or other
  misc_feature (19)..(20): Phosphorothioate linkage
  modified_base (20)..(20): 2' O-methyl modified a, c, u, g, or other
  misc_feature (20)..(21): Phosphorothioate linkage
  modified_base (21)..(21): 2' O-methyl modified a, c, u, g, or other
nnnnnnnnnnnnnnnnnnnnn

SEQ ID NO: 6017 - RNA, 21 nt, Artificial Sequence
  Description of Artificial Sequence: Synthetic oligonucleotide
  modified_base (1)..(1): 2' O-methyl modified a, c, u, g, or other
  misc_feature (1)..(2): Phosphorothioate linkage
  modified_base (2)..(2): 2' O-methyl modified a, c, u, g, or other
  misc_feature (2)..(3): Phosphorothioate linkage
  modified_base (3)..(3): 2' O-methyl modified a, c, u, g, or other
  modified_base (4)..(4): 2' O-methyl modified a, c, u, g, or other
  modified_base (5)..(5): 2' fluoro-modified a, c, u, g, or other
  modified_base (6)..(6): 2' O-methyl modified a, c, u, g, or other
  modified_base (7)..(7): 2' fluoro-modified a, c, u, g, or other
  modified_base (8)..(8): 2' O-methyl modified a, c, u, g, or other
  modified_base (9)..(9): 2' fluoro-modified a, c, u, g, or other
  modified_base (10)..(10): 2' O-methyl modified a, c, u, g, or other
  modified_base (11)..(11): 2' O-methyl modified a, c, u, g, or other
  modified_base (12)..(12): 2' O-methyl modified a, c, u, g, or other
  modified_base (13)..(13): 2' O-methyl modified a, c, u, g, or other
  modified_base (14)..(14): 2' O-methyl modified a, c, u, g, or other
  modified_base (15)..(15): 2' O-methyl modified a, c, u, g, or other
  modified_base (16)..(16): 2' O-methyl modified a, c, u, g, or other
  modified_base (17)..(17): 2' O-methyl modified a, c, u, g, or other
  modified_base (18)..(18): 2' O-methyl modified a, c, u, g, or other
  modified_base (19)..(19): 2' O-methyl modified a, c, u, g, or other
  misc_feature (19)..(20): Phosphorothioate linkage
  modified_base (20)..(20): 2' O-methyl modified a, c, u, g, or other
  misc_feature (20)..(21): Phosphorothioate linkage
  modified_base (21)..(21): 2' O-methyl modified a, c, u, g, or other
nnnnnnnnnnnnnnnnnnnnn

SEQ ID NO: 6018 - RNA, 22 nt, Artificial Sequence
  Description of Artificial Sequence: Synthetic oligonucleotide
  modified_base (1)..(1): 2' fluoro-modified a, c, u, g, or other
  misc_feature (1)..(2): Phosphorothioate linkage
  modified_base (2)..(2): 2' O-methyl modified a, c, u, g, or other
  misc_feature (2)..(3): Phosphorothioate linkage
  modified_base (3)..(3): 2' fluoro-modified a, c, u, g, or other
  modified_base (4)..(4): 2' O-methyl modified a, c, u, g, or other
  modified_base (5)..(5): 2' fluoro-modified a, c, u, g, or other
  modified_base (6)..(6): 2' O-methyl modified a, c, u, g, or other
  modified_base (7)..(7): 2' fluoro-modified a, c, u, g, or other
  modified_base (8)..(8): 2' fluoro-modified a, c, u, g, or other
  modified_base (9)..(9): 2' fluoro-modified a, c, u, g, or other
  modified_base (10)..(10): 2' O-methyl modified a, c, u, g, or other
  modified_base (11)..(11): 2' fluoro-modified a, c, u, g, or other
  modified_base (12)..(12): 2' O-methyl modified a, c, u, g, or other
  modified_base (13)..(13): 2' fluoro-modified a, c, u, g, or other
  modified_base (14)..(14): 2' O-methyl modified a, c, u, g, or other
  modified_base (15)..(15): 2' fluoro-modified a, c, u, g, or other
  modified_base (16)..(16): 2' O-methyl modified a, c, u, g, or other
  modified_base (17)..(17): 2' fluoro-modified a, c, u, g, or other
  modified_base (18)..(18): 2' O-methyl modified a, c, u, g, or other
  modified_base (19)..(19): 2' fluoro-modified a, c, u, g, or other
  modified_base (20)..(20): 2' O-methyl modified a, c, u, g, or other
  misc_feature (20)..(21): Phosphorothioate linkage
  modified_base (21)..(21): 2' O-methyl modified a, c, u, g, or other
  misc_feature (21)..(22): Phosphorothioate linkage
  modified_base (22)..(22): a, c, u, g, unknown or other
nnnnnnnnnnnnnnnnnnnnnn

SEQ ID NO: 6019 - RNA, 22 nt, Artificial Sequence
  Description of Artificial Sequence: Synthetic oligonucleotide
  modified_base (1)..(1): 2' O-methyl modified a, c, u, g, or other
  misc_feature (1)..(2): Phosphorothioate linkage
  modified_base (2)..(2): 2' O-methyl modified a, c, u, g, or other
  misc_feature (2)..(3): Phosphorothioate linkage
  modified_base (3)..(3): 2' O-methyl modified a, c, u, g, or other
  modified_base (4)..(4): 2' O-methyl modified a, c, u, g, or other
  modified_base (5)..(5): 2' fluoro-modified a, c, u, g, or other
  modified_base (6)..(6): 2' O-methyl modified a, c, u, g, or other
  modified_base (7)..(7): 2' fluoro-modified a, c, u, g, or other
  modified_base (8)..(8): 2' fluoro-modified a, c, u, g, or other
  modified_base (9)..(9): 2' fluoro-modified a, c, u, g, or other
  modified_base (10)..(10): 2' O-methyl modified a, c, u, g, or other
  modified_base (11)..(11): 2' O-methyl modified a, c, u, g, or other
  modified_base (12)..(12): 2' O-methyl modified a, c, u, g, or other
  modified_base (13)..(13): 2' O-methyl modified a, c, u, g, or other
  modified_base (14)..(14): 2' O-methyl modified a, c, u, g, or other
  modified_base (15)..(15): 2' O-methyl modified a, c, u, g, or other
  modified_base (16)..(16): 2' O-methyl modified a, c, u, g, or other
  modified_base (17)..(17): 2' O-methyl modified a, c, u, g, or other
  modified_base (18)..(18): 2' O-methyl modified a, c, u, g, or other
  modified_base (19)..(19): 2' O-methyl modified a, c, u, g, or other
  modified_base (20)..(20): 2' O-methyl modified a, c, u, g, or other
  misc_feature (20)..(21): Phosphorothioate linkage
  modified_base (21)..(21): 2' O-methyl modified a, c, u, g, or other
  misc_feature (21)..(22): Phosphorothioate linkage
  modified_base (22)..(22): a, c, u, g, unknown or other
nnnnnnnnnnnnnnnnnnnnnn

SEQ ID NO: 6020 - RNA, 21 nt, Artificial Sequence
  Description of Artificial Sequence: Synthetic oligonucleotide
  modified_base (1)..(1): 2' fluoro-modified a, c, u, g, or other
  misc_feature (1)..(2): Phosphorothioate linkage
  modified_base (2)..(2): 2' O-methyl modified a, c, u, g, or other
  misc_feature (2)..(3): Phosphorothioate linkage
  modified_base (3)..(3): 2' fluoro-modified a, c, u, g, or other
  modified_base (4)..(4): 2' O-methyl modified a, c, u, g, or other
  modified_base (5)..(5): 2' fluoro-modified a, c, u, g, or other
  modified_base (6)..(6): 2' O-methyl modified a, c, u, g, or other
  modified_base (7)..(7): 2' fluoro-modified a, c, u, g, or other
  modified_base (8)..(8): 2' O-methyl modified a, c, u, g, or other
  modified_base (9)..(9): 2' fluoro-modified a, c, u, g, or other
  modified_base (10)..(10): 2' O-methyl modified a, c, u, g, or other
  modified_base (11)..(11): 2' fluoro-modified a, c, u, g, or other
  modified_base (12)..(12): 2' O-methyl modified a, c, u, g, or other
  modified_base (13)..(13): 2' fluoro-modified a, c, u, g, or other
  modified_base (14)..(14): 2' O-methyl modified a, c, u, g, or other
  modified_base (15)..(15): 2' fluoro-modified a, c, u, g, or other
  modified_base (16)..(16): 2' O-methyl modified a, c, u, g, or other
  modified_base (17)..(17): 2' fluoro-modified a, c, u, g, or other
  modified_base (18)..(18): 2' O-methyl modified a, c, u, g, or other
  modified_base (19)..(19): 2' fluoro-modified a, c, u, g, or other
  misc_feature (19)..(20): Phosphorothioate linkage
  modified_base (20)..(20): 2' O-methyl modified a, c, u, g, or other
  misc_feature (20)..(21): Phosphorothioate linkage
  modified_base (21)..(21): 2' O-methyl modified a, c, u, g, or other
nnnnnnnnnnnnnnnnnnnnn

SEQ ID NO: 6021 - RNA, 21 nt, Artificial Sequence
  Description of Artificial Sequence: Synthetic oligonucleotide
  modified_base (1)..(1): 2' O-methyl modified a, c, u, g, or other
  misc_feature (1)..(2): Phosphorothioate linkage
  modified_base (2)..(2): 2' O-methyl modified a, c, u, g, or other
  misc_feature (2)..(3): Phosphorothioate linkage
  modified_base (3)..(3): 2' O-methyl modified a, c, u, g, or other
  modified_base (4)..(4): 2' O-methyl modified a, c, u, g, or other
  modified_base (5)..(5): 2' fluoro-modified a, c, u, g, or other
  modified_base (6)..(6): 2' fluoro-modified a, c, u, g, or other
  modified_base (7)..(7): 2' fluoro-modified a, c, u, g, or other
  modified_base (8)..(8): 2' fluoro-modified a, c, u, g, or other
  modified_base (9)..(9): 2' fluoro-modified a, c, u, g, or other
  modified_base (10)..(10): 2' O-methyl modified a, c, u, g, or other
  modified_base (11)..(11): 2' O-methyl modified a, c, u, g, or other
  modified_base (12)..(12): 2' O-methyl modified a, c, u, g, or other
  modified_base (13)..(13): 2' O-methyl modified a, c, u, g, or other
  modified_base (14)..(14): 2' O-methyl modified a, c, u, g, or other
  modified_base (15)..(15): 2' O-methyl modified a, c, u, g, or other
  modified_base (16)..(16): 2' O-methyl modified a, c, u, g, or other
  modified_base (17)..(17): 2' O-methyl modified a, c, u, g, or other
  modified_base (18)..(18): 2' O-methyl modified a, c, u, g, or other
  modified_base (19)..(19): 2' O-methyl modified a, c, u, g, or other
  misc_feature (19)..(20): Phosphorothioate linkage
  modified_base (20)..(20): 2' O-methyl modified a, c, u, g, or other
  misc_feature (20)..(21): Phosphorothioate linkage
  modified_base (21)..(21): 2' O-methyl modified a, c, u, g, or other
nnnnnnnnnnnnnnnnnnnnn

SEQ ID NO: 6022 - RNA, 21 nt, Artificial Sequence
  Description of Artificial Sequence: Synthetic oligonucleotide
  modified_base (1)..(1): 2' O-methyl modified a, c, u, g, or other
  misc_feature (1)..(2): Phosphorothioate linkage
  modified_base (2)..(2): 2' O-methyl modified a, c, u, g, or other
  misc_feature (2)..(3): Phosphorothioate linkage
  modified_base (3)..(3): 2' O-methyl modified a, c, u, g, or other
  modified_base (4)..(4): 2' O-methyl modified a, c, u, g, or other
  modified_base (5)..(5): 2' O-methyl modified a, c, u, g, or other
  modified_base (6)..(6): 2' fluoro-modified a, c, u, g, or other
  modified_base (7)..(7): 2' fluoro-modified a, c, u, g, or other
  modified_base (8)..(8): 2' fluoro-modified a, c, u, g, or other
  modified_base (9)..(9): 2' fluoro-modified a, c, u, g, or other
  modified_base (10)..(10): 2' O-methyl modified a, c, u, g, or other
  modified_base (11)..(11): 2' O-methyl modified a, c, u, g, or other
  modified_base (12)..(12): 2' O-methyl modified a, c, u, g, or other
  modified_base (13)..(13): 2' O-methyl modified a, c, u, g, or other
  modified_base (14)..(14): 2' O-methyl modified a, c, u, g, or other
  modified_base (15)..(15): 2' O-methyl modified a, c, u, g, or other
  modified_base (16)..(16): 2' O-methyl modified a, c, u, g, or other
  modified_base (17)..(17): 2' O-methyl modified a, c, u, g, or other
  modified_base (18)..(18): 2' O-methyl modified a, c, u, g, or other
  modified_base (19)..(19): 2' O-methyl modified a, c, u, g, or other
  misc_feature (19)..(20): Phosphorothioate linkage
  modified_base (20)..(20): 2' O-methyl modified a, c, u, g, or other
  misc_feature (20)..(21): Phosphorothioate linkage
  modified_base (21)..(21): 2' O-methyl modified a, c, u, g, or other
nnnnnnnnnnnnnnnnnnnnn

SEQ ID NO: 6023 - RNA, 21 nt, Artificial Sequence
  Description of Artificial Sequence: Synthetic oligonucleotide
  modified_base (1)..(1): 2' O-methyl modified a, c, u, g, or other
  misc_feature (1)..(2): Phosphorothioate linkage
  modified_base (2)..(2): 2' O-methyl modified a, c, u, g, or other
  misc_feature (2)..(3): Phosphorothioate linkage
  modified_base (3)..(3): 2' O-methyl modified a, c, u, g, or other
  modified_base (4)..(4): 2' O-methyl modified a, c, u, g, or other
  modified_base (5)..(5): 2' O-methyl modified a, c, u, g, or other
  modified_base (6)..(6): 2' O-methyl modified a, c, u, g, or other
  modified_base (7)..(7): 2' fluoro-modified a, c, u, g, or other
  modified_base (8)..(8): 2' fluoro-modified a, c, u, g, or other
  modified_base (9)..(9): 2' fluoro-modified a, c, u, g, or other
  modified_base (10)..(10): 2' fluoro-modified a, c, u, g, or other
  modified_base (11)..(11): 2' O-methyl modified a, c, u, g, or other
  modified_base (12)..(12): 2' O-methyl modified a, c, u, g, or other
  modified_base (13)..(13): 2' O-methyl modified a, c, u, g, or other
  modified_base (14)..(14): 2' O-methyl modified a, c, u, g, or other
  modified_base (15)..(15): 2' O-methyl modified a, c, u, g, or other
  modified_base (16)..(16): 2' O-methyl modified a, c, u, g, or other
  modified_base (17)..(17): 2' O-methyl modified a, c, u, g, or other
  modified_base (18)..(18): 2' O-methyl modified a, c, u, g, or other
  modified_base (19)..(19): 2' O-methyl modified a, c, u, g, or other
  misc_feature (19)..(20): Phosphorothioate linkage
  modified_base (20)..(20): 2' O-methyl modified a, c, u, g, or other
  misc_feature (20)..(21): Phosphorothioate linkage
  modified_base (21)..(21): 2' O-methyl modified a, c, u, g, or other
nnnnnnnnnnnnnnnnnnnnn

SEQ ID NO: 6024 - RNA, 21 nt, Artificial Sequence
  Description of Artificial Sequence: Synthetic oligonucleotide
  modified_base (1)..(1): 2' fluoro-modified a, c, u, g, or other
  misc_feature (1)..(2): Phosphorothioate linkage
  modified_base (2)..(2): 2' O-methyl modified a, c, u, g, or other
  modified_base (3)..(3): 2' fluoro-modified a, c, u, g, or other
  modified_base (4)..(4): 2' O-methyl modified a, c, u, g, or other
  modified_base (5)..(5): 2' fluoro-modified a, c, u, g, or other
  modified_base (6)..(6): 2' O-methyl modified a, c, u, g, or other
  modified_base (7)..(7): 2' fluoro-modified a, c, u, g, or other
  modified_base (8)..(8): 2' fluoro-modified a, c, u, g, or other
  modified_base (9)..(9): 2' fluoro-modified a, c, u, g, or other
  modified_base (10)..(10): 2' O-methyl modified a, c, u, g, or other
  modified_base (11)..(11): 2' fluoro-modified a, c, u, g, or other
  modified_base (12)..(12): 2' O-methyl modified a, c, u, g, or other
  modified_base (13)..(13): 2' fluoro-modified a, c, u, g, or other
  modified_base (14)..(14): 2' O-methyl modified a, c, u, g, or other
  modified_base (15)..(15): 2' fluoro-modified a, c, u, g, or other
  modified_base (16)..(16): 2' O-methyl modified a, c, u, g, or other
  modified_base (17)..(17): 2' fluoro-modified a, c, u, g, or other
  modified_base (18)..(18): 2' O-methyl modified a, c, u, g, or other
  modified_base (19)..(19): 2' fluoro-modified a, c, u, g, or other
  misc_feature (19)..(20): Phosphorothioate linkage
  modified_base (20)..(20): 2' O-methyl modified a, c, u, g, or other
  misc_feature (20)..(21): Phosphorothioate linkage
  modified_base (21)..(21): 2' O-methyl modified a, c, u, g, or other
nnnnnnnnnnnnnnnnnnnnn

SEQ ID NO: 6025 - RNA, 21 nt, Artificial Sequence
  Description of Artificial Sequence: Synthetic oligonucleotide
  modified_base (1)..(1): 2' fluoro-modified a, c, u, g, or other
  misc_feature (1)..(2): Phosphorothioate linkage
  modified_base (2)..(2): 2' O-methyl modified a, c, u, g, or other
  modified_base (3)..(3): 2' fluoro-modified a, c, u, g, or other
  modified_base (4)..(4): 2' O-methyl modified a, c, u, g, or other
  modified_base (5)..(5): 2' fluoro-modified a, c, u, g, or other
  modified_base (6)..(6): 2' O-methyl modified a, c, u, g, or other
  modified_base (7)..(7): 2' fluoro-modified a, c, u, g, or other
  modified_base (8)..(8): 2' O-methyl modified a, c, u, g, or other
  modified_base (9)..(9): 2' fluoro-modified a, c, u, g, or other
  modified_base (10)..(10): 2' O-methyl modified a, c, u, g, or other
  modified_base (11)..(11): 2' fluoro-modified a, c, u, g, or other
  modified_base (12)..(12): 2' O-methyl modified a, c, u, g, or other
  modified_base (13)..(13): 2' fluoro-modified a, c, u, g, or other
  modified_base (14)..(14): 2' O-methyl modified a, c, u, g, or other
  modified_base (15)..(15): 2' fluoro-modified a, c, u, g, or other
  modified_base (16)..(16): 2' O-methyl modified a, c, u, g, or other
  modified_base (17)..(17): 2' fluoro-modified a, c, u, g, or other
  modified_base (18)..(18): 2' O-methyl modified a, c, u, g, or other
  modified_base (19)..(19): 2' fluoro-modified a, c, u, g, or other
  misc_feature (19)..(20): Phosphorothioate linkage
  modified_base (20)..(20): 2' O-methyl modified a, c, u, g, or other
  misc_feature (20)..(21): Phosphorothioate linkage
  modified_base (21)..(21): 2' O-methyl modified a, c, u, g, or other
nnnnnnnnnnnnnnnnnnnnn

SEQ ID NO: 6026 - RNA, 21 nt, Artificial Sequence
  Description of Artificial Sequence: Synthetic oligonucleotide
  modified_base (1)..(1): 2' fluoro-modified a, c, u, g, or other
  modified_base (2)..(2): 2' O-methyl modified a, c, u, g, or other
  modified_base (3)..(3): 2' fluoro-modified a, c, u, g, or other
  modified_base (4)..(4): 2' O-methyl modified a, c, u, g, or other
  modified_base (5)..(5): 2' fluoro-modified a, c, u, g, or other
  modified_base (6)..(6): 2' O-methyl modified a, c, u, g, or other
  modified_base (7)..(7): 2' fluoro-modified a, c, u, g, or other
  modified_base (8)..(8): 2' O-methyl modified a, c, u, g, or other
  modified_base (9)..(9): 2' fluoro-modified a, c, u, g, or other
  modified_base (10)..(10): 2' O-methyl modified a, c, u, g, or other
  modified_base (11)..(11): 2' fluoro-modified a, c, u, g, or other
  modified_base (12)..(12): 2' O-methyl modified a, c, u, g, or other
  modified_base (13)..(13): 2' fluoro-modified a, c, u, g, or other
  modified_base (14)..(14): 2' O-methyl modified a, c, u, g, or other
  modified_base (15)..(15): 2' fluoro-modified a, c, u, g, or other
  modified_base (16)..(16): 2' O-methyl modified a, c, u, g, or other
  modified_base (17)..(17): 2' fluoro-modified a, c, u, g, or other
  modified_base (18)..(18): 2' O-methyl modified a, c, u, g, or other
  modified_base (19)..(19): 2' fluoro-modified a, c, u, g, or other
  misc_feature (19)..(20): Phosphorothioate linkage
  modified_base (20)..(20): 2' O-methyl modified a, c, u, g, or other
  misc_feature (20)..(21): Phosphorothioate linkage
  modified_base (21)..(21): 2' O-methyl modified a, c, u, g, or other
nnnnnnnnnnnnnnnnnnnnn

SEQ ID NO: 6027 - RNA, 21 nt, Artificial Sequence
  Description of Artificial Sequence: Synthetic oligonucleotide
  modified_base (1)..(1): 2' O-methyl modified a, c, u, g, or other
  modified_base (2)..(2): 2' O-methyl modified a, c, u, g, or other
  modified_base (3)..(3): 2' O-methyl modified a, c, u, g, or other
  modified_base (4)..(4): 2' O-methyl modified a, c, u, g, or other
  modified_base (5)..(5): 2' O-methyl modified a, c, u, g, or other
  modified_base (6)..(6): 2' O-methyl modified a, c, u, g, or other
  modified_base (7)..(7): 2' fluoro-modified a, c, u, g, or other
  modified_base (8)..(8): 2' O-methyl modified a, c, u, g, or other
  modified_base (9)..(9): 2' fluoro-modified a, c, u, g, or other
  modified_base (10)..(10): 2' O-methyl modified a, c, u, g, or other
  modified_base (11)..(11): 2' O-methyl modified a, c, u, g, or other
  modified_base (12)..(12): 2' O-methyl modified a, c, u, g, or other
  modified_base (13)..(13): 2' O-methyl modified a, c, u, g, or other
  modified_base (14)..(14): 2' O-methyl modified a, c, u, g, or other
  modified_base (15)..(15): 2' O-methyl modified a, c, u, g, or other
  modified_base (16)..(16): 2' O-methyl modified a, c, u, g, or other
  modified_base (17)..(17): 2' O-methyl modified a, c, u, g, or other
  modified_base (18)..(18): 2' O-methyl modified a, c, u, g, or other
  modified_base (19)..(19): 2' O-methyl modified a, c, u, g, or other
  misc_feature (19)..(20): Phosphorothioate linkage
  modified_base (20)..(20): 2' O-methyl modified a, c, u, g, or other
  misc_feature (20)..(21): Phosphorothioate linkage
  modified_base (21)..(21): 2' O-methyl modified a, c, u, g, or other
nnnnnnnnnnnnnnnnnnnnn

SEQ ID NO: 6028 - RNA, 21 nt, Artificial Sequence
  Description of Artificial Sequence: Synthetic oligonucleotide
  modified_base (1)..(1): 2' O-methyl modified a, c, u, g, or other
  modified_base (2)..(2): 2' O-methyl modified a, c, u, g, or other
  modified_base (3)..(3): 2' O-methyl modified a, c, u, g, or other
  modified_base (4)..(4): 2' O-methyl modified a, c, u, g, or other
  modified_base (5)..(5): 2' O-methyl modified a, c, u, g, or other
  modified_base (6)..(6): 2' O-methyl modified a, c, u, g, or other
  modified_base (7)..(7): 2' O-methyl modified a, c, u, g, or other
  modified_base (8)..(8): 2' fluoro-modified a, c, u, g, or other
  modified_base (9)..(9): 2' fluoro-modified a, c, u, g, or other
  modified_base (10)..(10): 2' fluoro-modified a, c, u, g, or other
  modified_base (11)..(11): 2' fluoro-modified a, c, u, g, or other
  modified_base (12)..(12): 2' O-methyl modified a, c, u, g, or other
  modified_base (13)..(13): 2' O-methyl modified a, c, u, g, or other
  modified_base (14)..(14): 2' O-methyl modified a, c, u, g, or other
  modified_base (15)..(15): 2' O-methyl modified a, c, u, g, or other
  modified_base (16)..(16): 2' O-methyl modified a, c, u, g, or other
  modified_base (17)..(17): 2' O-methyl modified a, c, u, g, or other
  modified_base (18)..(18): 2' O-methyl modified a, c, u, g, or other
  modified_base (19)..(19): 2' O-methyl modified a, c, u, g, or other
  misc_feature (19)..(20): Phosphorothioate linkage
  modified_base (20)..(20): 2' O-methyl modified a, c, u, g, or other
  misc_feature (20)..(21): Phosphorothioate linkage
  modified_base (21)..(21): 2' O-methyl modified a, c, u, g, or other
nnnnnnnnnnnnnnnnnnnnn

SEQ ID NO: 6029 - RNA, 21 nt, Artificial Sequence
  Description of Artificial Sequence: Synthetic oligonucleotide
  modified_base (1)..(1): 2' O-methyl modified a, c, u, g, or other
  modified_base (2)..(2): 2' O-methyl modified a, c, u, g, or other
  modified_base (3)..(3): 2' O-methyl modified a, c, u, g, or other
  modified_base (4)..(4): 2' O-methyl modified a, c, u, g, or other
  modified_base (5)..(5): 2' fluoro-modified a, c, u, g, or other
  modified_base (6)..(6): 2' O-methyl modified a, c, u, g, or other
  modified_base (7)..(7): 2' O-methyl modified a, c, u, g, or other
  modified_base (8)..(8): 2' O-methyl modified a, c, u, g, or other
  modified_base (9)..(9): 2' fluoro-modified a, c, u, g, or other
  modified_base (10)..(10): 2' O-methyl modified a, c, u, g, or other
  modified_base (11)..(11): 2' fluoro-modified a, c, u, g, or other
  modified_base (12)..(12): 2' O-methyl modified a, c, u, g, or other
  modified_base (13)..(13): 2' O-methyl modified a, c, u, g, or other
  modified_base (14)..(14): 2' O-methyl modified a, c, u, g, or other
  modified_base (15)..(15): 2' O-methyl modified a, c, u, g, or other
  modified_base (16)..(16): 2' O-methyl modified a, c, u, g, or other
  modified_base (17)..(17): 2' O-methyl modified a, c, u, g, or other
  modified_base (18)..(18): 2' O-methyl modified a, c, u, g, or other
  modified_base (19)..(19): 2' O-methyl modified a, c, u, g, or other
  misc_feature (19)..(20): Phosphorothioate linkage
  modified_base (20)..(20): 2' O-methyl modified a, c, u, g, or other
  misc_feature (20)..(21): Phosphorothioate linkage
  modified_base (21)..(21): 2' O-methyl modified a, c, u, g, or other
nnnnnnnnnnnnnnnnnnnnn

SEQ ID NO: 6030 - RNA, 21 nt, Artificial Sequence
  Description of Artificial Sequence: Synthetic oligonucleotide
  modified_base (1)..(1): 2' O-methyl modified a, c, u, g, or other
  modified_base (2)..(2): 2' O-methyl modified a, c, u, g, or other
  modified_base (3)..(3): 2' O-methyl modified a, c, u, g, or other
  modified_base (4)..(4): 2' O-methyl modified a, c, u, g, or other
  modified_base (5)..(5): 2' O-methyl modified a, c, u, g, or other
  modified_base (6)..(6): 2' O-methyl modified a, c, u, g, or other
  modified_base (7)..(7): 2' O-methyl modified a, c, u, g, or other
  modified_base (8)..(8): 2' fluoro-modified a, c, u, g, or other
  modified_base (9)..(9): 2' fluoro-modified a, c, u, g, or other
  modified_base (10)..(10): 2' O-methyl modified a, c, u, g, or other
  modified_base (11)..(11): 2' fluoro-modified a, c, u, g, or other
  modified_base (12)..(12): 2' O-methyl modified a, c, u, g, or other
  modified_base (13)..(13): 2' O-methyl modified a, c, u, g, or other
  modified_base (14)..(14): 2' O-methyl modified a, c, u, g, or other
  modified_base (15)..(15): 2' O-methyl modified a, c, u, g, or other
  modified_base (16)..(16): 2' O-methyl modified a, c, u, g, or other
  modified_base (17)..(17): 2' O-methyl modified a, c, u, g, or other
  modified_base (18)..(18): 2' O-methyl modified a, c, u, g, or other
  modified_base (19)..(19): 2' O-methyl modified a, c, u, g, or other
  misc_feature (19)..(20): Phosphorothioate linkage
  modified_base (20)..(20): 2' O-methyl modified a, c, u, g, or other
  misc_feature (20)..(21): Phosphorothioate linkage
  modified_base (21)..(21): 2' O-methyl modified a, c, u, g, or other
nnnnnnnnnnnnnnnnnnnnn

SEQ ID NO: 6031 - RNA, 21 nt, Artificial Sequence
  Description of Artificial Sequence: Synthetic oligonucleotide
  modified_base (1)..(1): 2' O-methyl modified a, c, u, g, or other
  modified_base (2)..(2): 2' O-methyl modified a, c, u, g, or other
  modified_base (3)..(3): 2' O-methyl modified a, c, u, g, or other
  modified_base (4)..(4): 2' O-methyl modified a, c, u, g, or other
  modified_base (5)..(5): 2' O-methyl modified a, c, u, g, or other
  modified_base (6)..(6): 2' O-methyl modified a, c, u, g, or other
  modified_base (7)..(7): 2' fluoro-modified a, c, u, g, or other
  modified_base (8)..(8): 2' fluoro-modified a, c, u, g, or other
  modified_base (9)..(9): 2' fluoro-modified a, c, u, g, or other
  modified_base (10)..(10): 2' fluoro-modified a, c, u, g, or other
  modified_base (11)..(11): 2' fluoro-modified a, c, u, g, or other
  modified_base (12)..(12): 2' O-methyl modified a, c, u, g, or other
  modified_base (13)..(13): 2' O-methyl modified a, c, u, g, or other
  modified_base (14)..(14): 2' O-methyl modified a, c, u, g, or other
  modified_base (15)..(15): 2' O-methyl modified a, c, u, g, or other
  modified_base (16)..(16): 2' O-methyl modified a, c, u, g, or other
  modified_base (17)..(17): 2' O-methyl modified a, c, u, g, or other
  modified_base (18)..(18): 2' O-methyl modified a, c, u, g, or other
  modified_base (19)..(19): 2' O-methyl modified a, c, u, g, or other
  misc_feature (19)..(20): Phosphorothioate linkage
  modified_base (20)..(20): 2' O-methyl modified a, c, u, g, or other
  misc_feature (20)..(21): Phosphorothioate linkage
  modified_base (21)..(21): 2' O-methyl modified a, c, u, g, or other
nnnnnnnnnnnnnnnnnnnnn

SEQ ID NO: 6032 - RNA, 21 nt, Artificial Sequence
  Description of Artificial Sequence: Synthetic oligonucleotide
  modified_base (1)..(1): 2' O-methyl modified a, c, u, g, or other
  modified_base (2)..(2): 2' O-methyl modified a, c, u, g, or other
  modified_base (3)..(3): 2' O-methyl modified a, c, u, g, or other
  modified_base (4)..(4): 2' O-methyl modified a, c, u, g, or other
  modified_base (5)..(5): 2' fluoro-modified a, c, u, g, or other
  modified_base (6)..(6): 2' O-methyl modified a, c, u, g, or other
  modified_base (7)..(7): 2' fluoro-modified a, c, u, g, or other
  modified_base (8)..(8): 2' fluoro-modified a, c, u, g, or other
  modified_base (9)..(9): 2' fluoro-modified a, c, u, g, or other
  modified_base (10)..(10): 2' fluoro-modified a, c, u, g, or other
  modified_base (11)..(11): 2' O-methyl modified a, c, u, g, or other
  modified_base (12)..(12): 2' O-methyl modified a, c, u, g, or other
  modified_base (13)..(13): 2' O-methyl modified a, c, u, g, or other
  modified_base (14)..(14): 2' O-methyl modified a, c, u, g, or other
  modified_base (15)..(15): 2' O-methyl modified a, c, u, g, or other
  modified_base (16)..(16): 2' O-methyl modified a, c, u, g, or other
  modified_base (17)..(17): 2' O-methyl modified a, c, u, g, or other
  modified_base (18)..(18): 2' O-methyl modified a, c, u, g, or other
  modified_base (19)..(19): 2' O-methyl modified a, c, u, g, or other
  misc_feature (19)..(20): Phosphorothioate linkage
  modified_base (20)..(20): 2' O-methyl modified a, c, u, g, or other
  misc_feature (20)..(21): Phosphorothioate linkage
  modified_base (21)..(21): 2' O-methyl modified a, c, u, g, or other
nnnnnnnnnnnnnnnnnnnnn

SEQ ID NO: 6033 - RNA, 21 nt, Artificial Sequence
  Description of Artificial Sequence: Synthetic oligonucleotide
  modified_base (1)..(1): 2' O-methyl modified a, c, u, g, or other
  modified_base (2)..(2): 2' O-methyl modified a, c, u, g, or other
  modified_base (3)..(3): 2' O-methyl modified a, c, u, g, or other
  modified_base (4)..(4): 2' O-methyl modified a, c, u, g, or other
  modified_base (5)..(5): 2' O-methyl modified a, c, u, g, or other
  modified_base (6)..(6): 2' fluoro-modified a, c, u, g, or other
  modified_base (7)..(7): 2' fluoro-modified a, c, u, g, or other
  modified_base (8)..(8): 2' fluoro-modified a, c, u, g, or other
  modified_base (9)..(9): 2' fluoro-modified a, c, u, g, or other
  modified_base (10)..(10): 2' O-methyl modified a, c, u, g, or other
  modified_base (11)..(11): 2' fluoro-modified a, c, u, g, or other
  modified_base (12)..(12): 2' O-methyl modified a, c, u, g, or other
  modified_base (13)..(13): 2' O-methyl modified a, c, u, g, or other
  modified_base (14)..(14): 2' O-methyl modified a, c, u, g, or other
  modified_base (15)..(15): 2' O-methyl modified a, c, u, g, or other
  modified_base (16)..(16): 2' O-methyl modified a, c, u, g, or other
  modified_base (17)..(17): 2' O-methyl modified a, c, u, g, or other
  modified_base (18)..(18): 2' O-methyl modified a, c, u, g, or other
  modified_base (19)..(19): 2' O-methyl modified a, c, u, g, or other
  misc_feature (19)..(20): Phosphorothioate linkage
  modified_base (20)..(20): 2' O-methyl modified a, c, u, g, or other
  misc_feature (20)..(21): Phosphorothioate linkage
  modified_base (21)..(21): 2' O-methyl modified a, c, u, g, or other
nnnnnnnnnnnnnnnnnnnnn

SEQ ID NO: 6034 - RNA, 21 nt, Artificial Sequence
  Description of Artificial Sequence: Synthetic oligonucleotide
  modified_base (1)..(1): 2' O-methyl modified a, c, u, g, or other
  modified_base (2)..(2): 2' O-methyl modified a, c, u, g, or other
  modified_base (3)..(3): 2' O-methyl modified a, c, u, g, or other
  modified_base (4)..(4): 2' O-methyl modified a, c, u, g, or other
  modified_base (5)..(5): 2' O-methyl modified a, c, u, g, or other
  modified_base (6)..(6): 2' fluoro-modified a, c, u, g, or other
  modified_base (7)..(7): 2' fluoro-modified a, c, u, g, or other
  modified_base (8)..(8): 2' fluoro-modified a, c, u, g, or other
  modified_base (9)..(9): 2' fluoro-modified a, c, u, g, or other
  modified_base (10)..(10): 2' O-methyl modified a, c, u, g, or other
  modified_base (11)..(11): 2' O-methyl modified a, c, u, g, or other
  modified_base (12)..(12): 2' O-methyl modified a, c, u, g, or other
  modified_base (13)..(13): 2' O-methyl modified a, c, u, g, or other
  modified_base (14)..(14): 2' O-methyl modified a, c, u, g, or other
  modified_base (15)..(15): 2' O-methyl modified a, c, u, g, or other
  modified_base (16)..(16): 2' O-methyl modified a, c, u, g, or other
  modified_base (17)..(17): 2' O-methyl modified a, c, u, g, or other
  modified_base (18)..(18): 2' O-methyl modified a, c, u, g, or other
  modified_base (19)..(19): 2' O-methyl modified a, c, u, g, or other
  misc_feature (19)..(20): Phosphorothioate linkage
  modified_base (20)..(20): 2' O-methyl modified a, c, u, g, or other
  misc_feature (20)..(21): Phosphorothioate linkage
  modified_base (21)..(21): 2' O-methyl modified a, c, u, g, or other
nnnnnnnnnnnnnnnnnnnnn

SEQ ID NO: 6035 - RNA, 21 nt, Artificial Sequence
  Description of Artificial Sequence: Synthetic oligonucleotide
  modified_base (1)..(1): 2' O-methyl modified a, c, u, g, or other
  modified_base (2)..(2): 2' O-methyl modified a, c, u, g, or other
  modified_base (3)..(3): 2' O-methyl modified a, c, u, g, or other
  modified_base (4)..(4): 2' O-methyl modified a, c, u, g, or other
  modified_base (5)..(5): 2' fluoro-modified a, c, u, g, or other
  modified_base (6)..(6): 2' fluoro-modified a, c, u, g, or other
  modified_base (7)..(7): 2' fluoro-modified a, c, u, g, or other
  modified_base (8)..(8): 2' fluoro-modified a, c, u, g, or other
  modified_base (9)..(9): 2' fluoro-modified a, c, u, g, or other
  modified_base (10)..(10): 2' O-methyl modified a, c, u, g, or other
  modified_base (11)..(11): 2' O-methyl modified a, c, u, g, or other
  modified_base (12)..(12): 2' O-methyl modified a, c, u, g, or other
  modified_base (13)..(13): 2' O-methyl modified a, c, u, g, or other
  modified_base (14)..(14): 2' O-methyl modified a, c, u, g, or other
  modified_base (15)..(15): 2' O-methyl modified a, c, u, g, or other
  modified_base (16)..(16): 2' O-methyl modified a, c, u, g, or other
  modified_base (17)..(17): 2' O-methyl modified a, c, u, g, or other
  modified_base (18)..(18): 2' O-methyl modified a, c, u, g, or other
  modified_base (19)..(19): 2' O-methyl modified a, c, u, g, or other
  misc_feature (19)..(20): Phosphorothioate linkage
  modified_base (20)..(20): 2' O-methyl modified a, c, u, g, or other
  misc_feature (20)..(21): Phosphorothioate linkage
  modified_base (21)..(21): 2' O-methyl modified a, c, u, g, or other
nnnnnnnnnnnnnnnnnnnnn

SEQ ID NO: 6036 - RNA, 21 nt, Artificial Sequence
  Description of Artificial Sequence: Synthetic oligonucleotide
  modified_base (1)..(1): 2' O-methyl modified a, c, u, g, or other
  modified_base (2)..(2): 2' O-methyl modified a, c, u, g, or other
  modified_base (3)..(3): 2' O-methyl modified a, c, u, g, or other
  modified_base (4)..(4): 2' O-methyl modified a, c, u, g, or other
  modified_base (5)..(5): 2' O-methyl modified a, c, u, g, or other
  modified_base (6)..(6): 2' O-methyl modified a, c, u, g, or other
  modified_base (7)..(7): 2' O-methyl modified a, c, u, g, or other
  modified_base (8)..(8): 2' O-methyl modified a, c, u, g, or other
  modified_base (9)..(9): 2' fluoro-modified a, c, u, g, or other
  modified_base (10)..(10): 2' fluoro-modified a, c, u, g, or other
  modified_base (11)..(11): 2' O-methyl modified a, c, u, g, or other
  modified_base (12)..(12): 2' O-methyl modified a, c, u, g, or other
  modified_base (13)..(13): 2' O-methyl modified a, c, u, g, or other
  modified_base (14)..(14): 2' O-methyl modified a, c, u, g, or other
  modified_base (15)..(15): 2' O-methyl modified a, c, u, g, or other
  modified_base (16)..(16): 2' O-methyl modified a, c, u, g, or other
  modified_base (17)..(17): 2' O-methyl modified a, c, u, g, or other
  modified_base (18)..(18): 2' O-methyl modified a, c, u, g, or other
  modified_base (19)..(19): 2' O-methyl modified a, c, u, g, or other
  misc_feature (19)..(20): Phosphorothioate linkage
  modified_base (20)..(20): 2' O-methyl modified a, c, u, g, or other
  misc_feature (20)..(21): Phosphorothioate linkage
  modified_base (21)..(21): 2' O-methyl modified a, c, u, g, or other
nnnnnnnnnnnnnnnnnnnnn

SEQ ID NO: 6037 - RNA, 21 nt, Artificial Sequence
  Description of Artificial Sequence: Synthetic oligonucleotide
  modified_base (1)..(1): 2' O-methyl modified a, c, u, g, or other
  modified_base (2)..(2): 2' O-methyl modified a, c, u, g, or other
  modified_base (3)..(3): 2' O-methyl modified a, c, u, g, or other
  modified_base (4)..(4): 2' O-methyl modified a, c, u, g, or other
  modified_base (5)..(5): 2' O-methyl modified a, c, u, g, or other
  modified_base (6)..(6): 2' O-methyl modified a, c, u, g, or other
  modified_base (7)..(7): 2' fluoro-modified a, c, u, g, or other
  modified_base (8)..(8): 2' fluoro-modified a, c, u, g, or other
  modified_base (9)..(9): 2' fluoro-modified a, c, u, g, or other
  modified_base (10)..(10): 2' fluoro-modified a, c, u, g, or other
  modified_base (11)..(11): 2' O-methyl modified a, c, u, g, or other
  modified_base (12)..(12): 2' O-methyl modified a, c, u, g, or other
  modified_base (13)..(13): 2' O-methyl modified a, c, u, g, or other
  modified_base (14)..(14): 2' O-methyl modified a, c, u, g, or other
  modified_base (15)..(15): 2' O-methyl modified a, c, u, g, or other
  modified_base (16)..(16): 2' O-methyl modified a, c, u, g, or other
  modified_base (17)..(17): 2' O-methyl modified a, c, u, g, or other
  modified_base (18)..(18): 2' O-methyl modified a, c, u, g, or other
  modified_base (19)..(19): 2' O-methyl modified a, c, u, g, or other
  misc_feature (19)..(20): Phosphorothioate linkage
  modified_base (20)..(20): 2' O-methyl modified a, c, u, g, or other
  misc_feature (20)..(21): Phosphorothioate linkage
  modified_base (21)..(21): 2' O-methyl modified a, c, u, g, or other
nnnnnnnnnnnnnnnnnnnnn

SEQ ID NO: 6038 - RNA, 21 nt, Artificial Sequence
  Description of Artificial Sequence: Synthetic oligonucleotide
  modified_base (1)..(1): 2' O-methyl modified a, c, u, g, or other
  modified_base (2)..(2): 2' O-methyl modified a, c, u, g, or other
  modified_base (3)..(3): 2' O-methyl modified a, c, u, g, or other
  modified_base (4)..(4): 2' O-methyl modified a, c, u, g, or other
  modified_base (5)..(5): 2' fluoro-modified a, c, u, g, or other
  modified_base (6)..(6): 2' fluoro-modified a, c, u, g, or other
  modified_base (7)..(7): 2' O-methyl modified a, c, u, g, or other
  modified_base (8)..(8): 2' O-methyl modified a, c, u, g, or other
  modified_base (9)..(9): 2' fluoro-modified a, c, u, g, or other
  modified_base (10)..(10): 2' O-methyl modified a, c, u, g, or other
  modified_base (11)..(11): 2' fluoro-modified a, c, u, g, or other
  modified_base (12)..(12): 2' O-methyl modified a, c, u, g, or other
  modified_base (13)..(13): 2' O-methyl modified a, c, u, g, or other
  modified_base (14)..(14): 2' O-methyl modified a, c, u, g, or other
  modified_base (15)..(15): 2' O-methyl modified a, c, u, g, or other
  modified_base (16)..(16): 2' O-methyl modified a, c, u, g, or other
  modified_base (17)..(17): 2' O-methyl modified a, c, u, g, or other
  modified_base (18)..(18): 2' O-methyl modified a, c, u, g, or other
  modified_base (19)..(19): 2' O-methyl modified a, c, u, g, or other
  misc_feature (19)..(20): Phosphorothioate linkage
  modified_base (20)..(20): 2' O-methyl modified a, c, u, g, or other
  misc_feature (20)..(21): Phosphorothioate linkage
  modified_base (21)..(21): 2' O-methyl modified a, c, u, g, or other
nnnnnnnnnnnnnnnnnnnnn

SEQ ID NO: 6039 - RNA, 21 nt, Artificial Sequence
  Description of Artificial Sequence: Synthetic oligonucleotide
  modified_base (1)..(1): 2' O-methyl modified a, c, u, g, or other
  modified_base (2)..(2): 2' O-methyl modified a, c, u, g, or other
  modified_base (3)..(3): 2' O-methyl modified a, c, u, g, or other
  modified_base (4)..(4): 2' O-methyl modified a, c, u, g, or other
  modified_base (5)..(5): 2' fluoro-modified a, c, u, g, or other
  modified_base (6)..(6): 2' O-methyl modified a, c, u, g, or other
  modified_base (7)..(7): 2' fluoro-modified a, c, u, g, or other
  modified_base (8)..(8): 2' O-methyl modified a, c, u, g, or other
  modified_base (9)..(9): 2' fluoro-modified a, c, u, g, or other
  modified_base (10)..(10): 2' O-methyl modified a, c, u, g, or other
  modified_base (11)..(11): 2' fluoro-modified a, c, u, g, or other
  modified_base (12)..(12): 2' O-methyl modified a, c, u, g, or other
  modified_base (13)..(13): 2' O-methyl modified a, c, u, g, or other
  modified_base (14)..(14): 2' O-methyl modified a, c, u, g, or other
  modified_base (15)..(15): 2' O-methyl modified a, c, u, g, or other
  modified_base (16)..(16): 2' O-methyl modified a, c, u, g, or other
  modified_base (17)..(17): 2' O-methyl modified a, c, u, g, or other
  modified_base (18)..(18): 2' O-methyl modified a, c, u, g, or other
  modified_base (19)..(19): 2' O-methyl modified a, c, u, g, or other
  misc_feature (19)..(20): Phosphorothioate linkage
  modified_base (20)..(20): 2' O-methyl modified a, c, u, g, or other
  misc_feature (20)..(21): Phosphorothioate linkage
  modified_base (21)..(21): 2' O-methyl modified a, c, u, g, or other
nnnnnnnnnnnnnnnnnnnnn

SEQ ID NO: 6040 - RNA, 21 nt, Artificial Sequence
  Description of Artificial Sequence: Synthetic oligonucleotide
  modified_base (1)..(1): 2' O-methyl modified a, c, u, g, or other
  modified_base (2)..(2): 2' O-methyl modified a, c, u, g, or other
  modified_base (3)..(3): 2' O-methyl modified a, c, u, g, or other
  modified_base (4)..(4): 2' O-methyl modified a, c, u, g, or other
  modified_base (5)..(5): 2' O-methyl modified a, c, u, g, or other
  modified_base (6)..(6): 2' fluoro-modified a, c, u, g, or other
  modified_base (7)..(7): 2' O-methyl modified a, c, u, g, or other
  modified_base (8)..(8): 2' O-methyl modified a, c, u, g, or other
  modified_base (9)..(9): 2' fluoro-modified a, c, u, g, or other
  modified_base (10)..(10): 2' O-methyl modified a, c, u, g, or other
  modified_base (11)..(11): 2' fluoro-modified a, c, u, g, or other
  modified_base (12)..(12): 2' O-methyl modified a, c, u, g, or other
  modified_base (13)..(13): 2' O-methyl modified a, c, u, g, or other
  modified_base (14)..(14): 2' O-methyl modified a, c, u, g, or other
  modified_base (15)..(15): 2' O-methyl modified a, c, u, g, or other
  modified_base (16)..(16): 2' O-methyl modified a, c, u, g, or other
  modified_base (17)..(17): 2' O-methyl modified a, c, u, g, or other
  modified_base (18)..(18): 2' O-methyl modified a, c, u, g, or other
  modified_base (19)..(19): 2' O-methyl modified a, c, u, g, or other
  misc_feature (19)..(20): Phosphorothioate linkage
  modified_base (20)..(20): 2' O-methyl modified a, c, u, g, or other
  misc_feature (20)..(21): Phosphorothioate linkage
  modified_base (21)..(21): 2' O-methyl modified a, c, u, g, or other
nnnnnnnnnnnnnnnnnnnnn

SEQ ID NO: 6041 - RNA, 21 nt, Artificial Sequence
  Description of Artificial Sequence: Synthetic oligonucleotide
  modified_base (1)..(1): 2' O-methyl modified a, c, u, g, or other
  modified_base (2)..(2): 2' O-methyl modified a, c, u, g, or other
  modified_base (3)..(3): 2' O-methyl modified a, c, u, g, or other
  modified_base (4)..(4): 2' O-methyl modified a, c, u, g, or other
  modified_base (5)..(5): 2' O-methyl modified a, c, u, g, or other
  modified_base (6)..(6): 2' fluoro-modified a, c, u, g, or other
  modified_base (7)..(7): 2' fluoro-modified a, c, u, g, or other
  modified_base (8)..(8): 2' O-methyl modified a, c, u, g, or other
  modified_base (9)..(9): 2' fluoro-modified a, c, u, g, or other
  modified_base (10)..(10): 2' O-methyl modified a, c, u, g, or other
  modified_base (11)..(11): 2' O-methyl modified a, c, u, g, or other
  modified_base (12)..(12): 2' O-methyl modified a, c, u, g, or other
  modified_base (13)..(13): 2' O-methyl modified a, c, u, g, or other
  modified_base (14)..(14): 2' O-methyl modified a, c, u, g, or other
  modified_base (15)..(15): 2' O-methyl modified a, c, u, g, or other
  modified_base (16)..(16): 2' O-methyl modified a, c, u, g, or other
  modified_base (17)..(17): 2' O-methyl modified a, c, u, g, or other
  modified_base (18)..(18): 2' O-methyl modified a, c, u, g, or other
  modified_base (19)..(19): 2' O-methyl modified a, c, u, g, or other
  misc_feature (19)..(20): Phosphorothioate linkage
  modified_base (20)..(20): 2' O-methyl modified a, c, u, g, or other
  misc_feature (20)..(21): Phosphorothioate linkage
  modified_base (21)..(21): 2' O-methyl modified a, c, u, g, or other
nnnnnnnnnnnnnnnnnnnnn

SEQ ID NO: 6042 - RNA, 21 nt, Artificial Sequence
  Description of Artificial Sequence: Synthetic oligonucleotide
  modified_base (1)..(1): 2' O-methyl modified a, c, u, g, or other
  modified_base (2)..(2): 2' O-methyl modified a, c, u, g, or other
  modified_base (3)..(3): 2' O-methyl modified a, c, u, g, or other
  modified_base (4)..(4): 2' O-methyl modified a, c, u, g, or other
  modified_base (5)..(5): 2' O-methyl modified a, c, u, g, or other
  modified_base (6)..(6): 2' O-methyl modified a, c, u, g, or other
  modified_base (7)..(7): 2' fluoro-modified a, c, u, g, or other
  modified_base (8)..(8): 2' O-methyl modified a, c, u, g, or other
  modified_base (9)..(9): 2' fluoro-modified a, c, u, g, or other
  modified_base (10)..(10): 2' fluoro-modified a, c, u, g, or other
  modified_base (11)..(11): 2' O-methyl modified a, c, u, g, or other
  modified_base (12)..(12): 2' O-methyl modified a, c, u, g, or other
  modified_base (13)..(13): 2' O-methyl modified a, c, u, g, or other
  modified_base (14)..(14): 2' O-methyl modified a, c, u, g, or other
  modified_base (15)..(15): 2' O-methyl modified a, c, u, g, or other
  modified_base (16)..(16): 2' O-methyl modified a, c, u, g, or other
  modified_base (17)..(17): 2' O-methyl modified a, c, u, g, or other
  modified_base (18)..(18): 2' O-methyl modified a, c, u, g, or other
  modified_base (19)..(19): 2' O-methyl modified a, c, u, g, or other
  misc_feature (19)..(20): Phosphorothioate linkage
  modified_base (20)..(20): 2' O-methyl modified a, c, u, g, or other
  misc_feature (20)..(21): Phosphorothioate linkage
  modified_base (21)..(21): 2' O-methyl modified a, c, u, g, or other
nnnnnnnnnnnnnnnnnnnnn

SEQ ID NO: 6043 - RNA, 21 nt, Artificial Sequence
  Description of Artificial Sequence: Synthetic oligonucleotide
  modified_base (1)..(1): 2' O-methyl modified a, c, u, g, or other
  modified_base (2)..(2): 2' fluoro-modified a, c, u, g, or other
  modified_base (3)..(3): 2' O-methyl modified a, c, u, g, or other
  modified_base (4)..(4): 2' fluoro-modified a, c, u, g, or other
  modified_base (5)..(5): 2' O-methyl modified a, c, u, g, or other
  modified_base (6)..(6): 2' fluoro-modified a, c, u, g, or other
  modified_base (7)..(7): 2' O-methyl modified a, c, u, g, or other
  modified_base (8)..(8): 2' fluoro-modified a, c, u, g, or other
  modified_base (9)..(9): 2' fluoro-modified a, c, u, g, or other
  modified_base (10)..(10): 2' O-methyl modified a, c, u, g, or other
  modified_base (11)..(11): 2' O-methyl modified a, c, u, g, or other
  modified_base (12)..(12): 2' O-methyl modified a, c, u, g, or other
  modified_base (13)..(13): 2' O-methyl modified a, c, u, g, or other
  modified_base (14)..(14): 2' O-methyl modified a, c, u, g, or other
  modified_base (15)..(15): 2' fluoro-modified a, c, u, g, or other
  modified_base (16)..(16): 2' O-methyl modified a, c, u, g, or other
  modified_base (17)..(17): 2' fluoro-modified a, c, u, g, or other
  modified_base (18)..(18): 2' fluoro-modified a, c, u, g, or other
  modified_base (19)..(19): 2' O-methyl modified a, c, u, g, or other
  misc_feature (19)..(20): Phosphorothioate linkage
  modified_base (20)..(20): 2' O-methyl modified a, c, u, g, or other
  misc_feature (20)..(21): Phosphorothioate linkage
  modified_base (21)..(21): 2' O-methyl modified a, c, u, g, or other
nnnnnnnnnnnnnnnnnnnnn

SEQ ID NO: 6044 - RNA, 21 nt, Artificial Sequence
  Description of Artificial Sequence: Synthetic oligonucleotide
  5' Phosphorothioate linkage
  modified_base (1)..(1): 2' O-methyl modified a, c, u, g, or other
  modified_base (2)..(2): 2' O-methyl modified a, c, u, g, or other
  modified_base (3)..(3): 2' O-methyl modified a, c, u, g, or other
  modified_base (4)..(4): 2' O-methyl modified a, c, u, g, or other
  modified_base (5)..(5): 2' O-methyl modified a, c, u, g, or other
  modified_base (6)..(6): 2' fluoro-modified a, c, u, g, or other
  modified_base (7)..(7): 2' fluoro-modified a, c, u, g, or other
  modified_base (8)..(8): 2' fluoro-modified a, c, u, g, or other
  modified_base (9)..(9): 2' fluoro-modified a, c, u, g, or other
  modified_base (10)..(10): 2' O-methyl modified a, c, u, g, or other
  modified_base (11)..(11): 2' fluoro-modified a, c, u, g, or other
  modified_base (12)..(12): 2' O-methyl modified a, c, u, g, or other
  modified_base (13)..(13): 2' O-methyl modified a, c, u, g, or other
  modified_base (14)..(14): 2' O-methyl modified a, c, u, g, or other
  modified_base (15)..(15): 2' O-methyl modified a, c, u, g, or other
  modified_base (16)..(16): 2' O-methyl modified a, c, u, g, or other
  modified_base (17)..(17): 2' O-methyl modified a, c, u, g, or other
  modified_base (18)..(18): 2' O-methyl modified a, c, u, g, or other
  modified_base (19)..(19): 2' O-methyl modified a, c, u, g, or other
  misc_feature (19)..(20): Phosphorothioate linkage
  modified_base (20)..(20): 2' O-methyl modified a, c, u, g, or other
  misc_feature (20)..(21): Phosphorothioate linkage
  modified_base (21)..(21): 2' O-methyl modified a, c, u, g, or other
nnnnnnnnnnnnnnnnnnnnn

SEQ ID NO: 6045 - RNA, 21 nt, Artificial Sequence
  Description of Artificial Sequence: Synthetic oligonucleotide
  5' Phosphorothioate linkage
  modified_base (1)..(1): 2' O-methyl modified a, c, u, g, or other
  modified_base (2)..(2): 2' O-methyl modified a, c, u, g, or other
  modified_base (3)..(3): 2' O-methyl modified a, c, u, g, or other
  modified_base (4)..(4): 2' O-methyl modified a, c, u, g, or other
  modified_base (5)..(5): 2' O-methyl modified a, c, u, g, or other
  modified_base (6)..(6): 2' fluoro-modified a, c, u, g, or other
  modified_base (7)..(7): 2' fluoro-modified a, c, u, g, or other
  modified_base (8)..(8): 2' fluoro-modified a, c, u, g, or other
  modified_base (9)..(9): 2' fluoro-modified a, c, u, g, or other
  modified_base (10)..(10): 2' O-methyl modified a, c, u, g, or other
  modified_base (11)..(11): 2' O-methyl modified a, c, u, g, or other
  modified_base (12)..(12): 2' O-methyl modified a, c, u, g, or other
  modified_base (13)..(13): 2' O-methyl modified a, c, u, g, or other
  modified_base (14)..(14): 2' O-methyl modified a, c, u, g, or other
  modified_base (15)..(15): 2' O-methyl modified a, c, u, g, or other
  modified_base (16)..(16): 2' O-methyl modified a, c, u, g, or other
  modified_base (17)..(17): 2' O-methyl modified a, c, u, g, or other
  modified_base (18)..(18): 2' O-methyl modified a, c, u, g, or other
  modified_base (19)..(19): 2' O-methyl modified a, c, u, g, or other
  misc_feature (19)..(20): Phosphorothioate linkage
  modified_base (20)..(20): 2' O-methyl modified a, c, u, g, or other
  misc_feature (20)..(21): Phosphorothioate linkage
  modified_base (21)..(21): 2' O-methyl modified a, c, u, g, or other
nnnnnnnnnnnnnnnnnnnnn

SEQ ID NO: 6046 - RNA, 21 nt, Artificial Sequence
  Description of Artificial Sequence: Synthetic oligonucleotide
  5' Phosphorothioate linkage
  modified_base (1)..(1): 2' O-methyl modified a, c, u, g, or other
  modified_base (2)..(2): 2' O-methyl modified a, c, u, g, or other
  modified_base (3)..(3): 2' O-methyl modified a, c, u, g, or other
  modified_base (4)..(4): 2' O-methyl modified a, c, u, g, or other
  modified_base (5)..(5): 2' fluoro-modified a, c, u, g, or other
  modified_base (6)..(6): 2' fluoro-modified a, c, u, g, or other
  modified_base (7)..(7): 2' fluoro-modified a, c, u, g, or other
  modified_base (8)..(8): 2' fluoro-modified a, c, u, g, or other
  modified_base (9)..(9): 2' fluoro-modified a, c, u, g, or other
  modified_base (10)..(10): 2' O-methyl modified a, c, u, g, or other
  modified_base (11)..(11): 2' O-methyl modified a, c, u, g, or other
  modified_base (12)..(12): 2' O-methyl modified a, c, u, g, or other
  modified_base (13)..(13): 2' O-methyl modified a, c, u, g, or other
  modified_base (14)..(14): 2' O-methyl modified a, c, u, g, or other
  modified_base (15)..(15): 2' O-methyl modified a, c, u, g, or other
  modified_base (16)..(16): 2' O-methyl modified a, c, u, g, or other
  modified_base (17)..(17): 2' O-methyl modified a, c, u, g, or other
  modified_base (18)..(18): 2' O-methyl modified a, c, u, g, or other
  modified_base (19)..(19): 2' O-methyl modified a, c, u, g, or other
  misc_feature (19)..(20): Phosphorothioate linkage
  modified_base (20)..(20): 2' O-methyl modified a, c, u, g, or other
  misc_feature (20)..(21): Phosphorothioate linkage
  modified_base (21)..(21): 2' O-methyl modified a, c, u, g, or other
nnnnnnnnnnnnnnnnnnnnn

SEQ ID NO: 6047 - RNA, 21 nt, Artificial Sequence
  Description of Artificial Sequence: Synthetic oligonucleotide
  5' Phosphorothioate linkage
  modified_base (1)..(1): 2' O-methyl modified a, c, u, g, or other
  modified_base (2)..(2): 2' O-methyl modified a, c, u, g, or other
  modified_base (3)..(3): 2' O-methyl modified a, c, u, g, or other
  modified_base (4)..(4): 2' O-methyl modified a, c, u, g, or other
  modified_base (5)..(5): 2' O-methyl modified a, c, u, g, or other
  modified_base (6)..(6): 2' O-methyl modified a, c, u, g, or other
  modified_base (7)..(7): 2' O-methyl modified a, c, u, g, or other
  modified_base (8)..(8): 2' O-methyl modified a, c, u, g, or other
  modified_base (9)..(9): 2' fluoro-modified a, c, u, g, or other
  modified_base (10)..(10): 2' fluoro-modified a, c, u, g, or other
  modified_base (11)..(11): 2' O-methyl modified a, c, u, g, or other
  modified_base (12)..(12): 2' O-methyl modified a, c, u, g, or other
  modified_base (13)..(13): 2' O-methyl modified a, c, u, g, or other
  modified_base (14)..(14): 2' O-methyl modified a, c, u, g, or other
  modified_base (15)..(15): 2' O-methyl modified a, c, u, g, or other
  modified_base (16)..(16): 2' O-methyl modified a, c, u, g, or other
  modified_base (17)..(17): 2' O-methyl modified a, c, u, g, or other
  modified_base (18)..(18): 2' O-methyl modified a, c, u, g, or other
  modified_base (19)..(19): 2' O-methyl modified a, c, u, g, or other
  misc_feature (19)..(20): Phosphorothioate linkage
  modified_base (20)..(20): 2' O-methyl modified a, c, u, g, or other
  misc_feature (20)..(21): Phosphorothioate linkage
  modified_base (21)..(21): 2' O-methyl modified a, c, u, g, or other
nnnnnnnnnnnnnnnnnnnnn

SEQ ID NO: 6048 - RNA, 21 nt, Artificial Sequence
  Description of Artificial Sequence: Synthetic oligonucleotide
  5' Phosphorothioate linkage
  modified_base (1)..(1): 2' O-methyl modified a, c, u, g, or other
  modified_base (2)..(2): 2' O-methyl modified a, c, u, g, or other
  modified_base (3)..(3): 2' O-methyl modified a, c, u, g, or other
  modified_base (4)..(4): 2' O-methyl modified a, c, u, g, or other
  modified_base (5)..(5): 2' fluoro-modified a, c, u, g, or other
  modified_base (6)..(6): 2' fluoro-modified a, c, u, g, or other
  modified_base (7)..(7): 2' O-methyl modified a, c, u, g, or other
  modified_base (8)..(8): 2' O-methyl modified a, c, u, g, or other
  modified_base (9)..(9): 2' fluoro-modified a, c, u, g, or other
  modified_base (10)..(10): 2' O-methyl modified a, c, u, g, or other
  modified_base (11)..(11): 2' fluoro-modified a, c, u, g, or other
  modified_base (12)..(12): 2' O-methyl modified a, c, u, g, or other
  modified_base (13)..(13): 2' O-methyl modified a, c, u, g, or other
  modified_base (14)..(14): 2' O-methyl modified a, c, u, g, or other
  modified_base (15)..(15): 2' O-methyl modified a, c, u, g, or other
  modified_base (16)..(16): 2' O-methyl modified a, c, u, g, or other
  modified_base (17)..(17): 2' O-methyl modified a, c, u, g, or other
  modified_base (18)..(18): 2' O-methyl modified a, c, u, g, or other
  modified_base (19)..(19): 2' O-methyl modified a, c, u, g, or other
  misc_feature (19)..(20): Phosphorothioate linkage
  modified_base (20)..(20): 2' O-methyl modified a, c, u, g, or other
  misc_feature (20)..(21): Phosphorothioate linkage
  modified_base (21)..(21): 2' O-methyl modified a, c, u, g, or other
nnnnnnnnnnnnnnnnnnnnn

SEQ ID NO: 6049 - RNA, 21 nt, Artificial Sequence
  Description of Artificial Sequence: Synthetic oligonucleotide
  5' Phosphorothioate linkage
  modified_base (1)..(1): 2' O-methyl modified a, c, u, g, or other
  modified_base (2)..(2): 2' fluoro-modified a, c, u, g, or other
  modified_base (3)..(3): 2' O-methyl modified a, c, u, g, or other
  modified_base (4)..(4): 2' fluoro-modified a, c, u, g, or other
  modified_base (5)..(5): 2' O-methyl modified a, c, u, g, or other
  modified_base (6)..(6): 2' fluoro-modified a, c, u, g, or other
  modified_base (7)..(7): 2' O-methyl modified a, c, u, g, or other
  modified_base (8)..(8): 2' fluoro-modified a, c, u, g, or other
  modified_base (9)..(9): 2' fluoro-modified a, c, u, g, or other
  modified_base (10)..(10): 2' O-methyl modified a, c, u, g, or other
  modified_base (11)..(11): 2' O-methyl modified a, c, u, g, or other
  modified_base (12)..(12): 2' O-methyl modified a, c, u, g, or other
  modified_base (13)..(13): 2' O-methyl modified a, c, u, g, or other
  modified_base (14)..(14): 2' O-methyl modified a, c, u, g, or other
  modified_base (15)..(15): 2' fluoro-modified a, c, u, g, or other
  modified_base (16)..(16): 2' O-methyl modified a, c, u, g, or other
  modified_base (17)..(17): 2' fluoro-modified a, c, u, g, or other
  modified_base (18)..(18): 2' fluoro-modified a, c, u, g, or other
  modified_base (19)..(19): 2' O-methyl modified a, c, u, g, or other
  misc_feature (19)..(20): Phosphorothioate linkage
  modified_base (20)..(20): 2' O-methyl modified a, c, u, g, or other
  misc_feature (20)..(21): Phosphorothioate linkage
  modified_base (21)..(21): 2' O-methyl modified a, c, u, g, or other
nnnnnnnnnnnnnnnnnnnnn

SEQ ID NO: 6050 - RNA, 21 nt, Artificial Sequence
  Description of Artificial Sequence: Synthetic oligonucleotide
  modified_base (1)..(1): 2' O-methyl modified a, c, u, g, or other
  modified_base (2)..(2): 2' O-methyl modified a, c, u, g, or other
  modified_base (3)..(3): 2' O-methyl modified a, c, u, g, or other
  modified_base (4)..(4): 2' O-methyl modified a, c, u, g, or other
  modified_base (5)..(5): 2' O-methyl modified a, c, u, g, or other
  modified_base (6)..(6): 2' fluoro-modified a, c, u, g, or other
  modified_base (7)..(7): 2' O-methyl modified a, c, u, g, or other
  modified_base (8)..(8): 2' fluoro-modified a, c, u, g, or other
  modified_base (9)..(9): 2' fluoro-modified a, c, u, g, or other
  modified_base (10)..(10): 2' O-methyl modified a, c, u, g, or other
  modified_base (11)..(11): 2' O-methyl modified a, c, u, g, or other
  modified_base (12)..(12): 2' O-methyl modified a, c, u, g, or other
  modified_base (13)..(13): 2' O-methyl modified a, c, u, g, or other
  modified_base (14)..(14): 2' O-methyl modified a, c, u, g, or other
  modified_base (15)..(15): 2' O-methyl modified a, c, u, g, or other
  modified_base (16)..(16): 2' O-methyl modified a, c, u, g, or other
  modified_base (17)..(17): 2' O-methyl modified a, c, u, g, or other
  modified_base (18)..(18): 2' O-methyl modified a, c, u, g, or other
  modified_base (19)..(19): 2' O-methyl modified a, c, u, g, or other
  misc_feature (19)..(20): Phosphorothioate linkage
  modified_base (20)..(20): 2' O-methyl modified a, c, u, g, or other
  misc_feature (20)..(21): Phosphorothioate linkage
  modified_base (21)..(21): 2' O-methyl modified a, c, u, g, or other
nnnnnnnnnnnnnnnnnnnnn

SEQ ID NO: 6051 - RNA, 21 nt, Artificial Sequence
  Description of Artificial Sequence: Synthetic oligonucleotide
  modified_base (1)..(1): 2' O-methyl modified a, c, u, g, or other
  modified_base (2)..(2): 2' O-methyl modified a, c, u, g, or other
  modified_base (3)..(3): 2' O-methyl modified a, c, u, g, or other
  modified_base (4)..(4): 2' O-methyl modified a, c, u, g, or other
  modified_base (5)..(5): 2' fluoro-modified a, c, u, g, or other
  modified_base (6)..(6): 2' O-methyl modified a, c, u, g, or other
  modified_base (7)..(7): 2' O-methyl modified a, c, u, g, or other
  modified_base (8)..(8): 2' fluoro-modified a, c, u, g, or other
  modified_base (9)..(9): 2' fluoro-modified a, c, u, g, or other
  modified_base (10)..(10): 2' O-methyl modified a, c, u, g, or other
  modified_base (11)..(11): 2' O-methyl modified a, c, u, g, or other
  modified_base (12)..(12): 2' O-methyl modified a, c, u, g, or other
  modified_base (13)..(13): 2' O-methyl modified a, c, u, g, or other
  modified_base (14)..(14): 2' O-methyl modified a, c, u, g, or other
  modified_base (15)..(15): 2' O-methyl modified a, c, u, g, or other
  modified_base (16)..(16): 2' O-methyl modified a, c, u, g, or other
  modified_base (17)..(17): 2' O-methyl modified a, c, u, g, or other
  modified_base (18)..(18): 2' O-methyl modified a, c, u, g, or other
  modified_base (19)..(19): 2' O-methyl modified a, c, u, g, or other
  misc_feature (19)..(20): Phosphorothioate linkage
  modified_base (20)..(20): 2' O-methyl modified a, c, u, g, or other
  misc_feature (20)..(21): Phosphorothioate linkage
  modified_base (21)..(21): 2' O-methyl modified a, c, u, g, or other
nnnnnnnnnnnnnnnnnnnnn

SEQ ID NO: 6052 - RNA, 21 nt, Artificial Sequence
  Description of Artificial Sequence: Synthetic oligonucleotide
  modified_base (1)..(1): 2' O-methyl modified a, c, u, g, or other
  modified_base (2)..(2): 2' O-methyl modified a, c, u, g, or other
  modified_base (3)..(3): 2' O-methyl modified a, c, u, g, or other
  modified_base (4)..(4): 2' O-methyl modified a, c, u, g, or other
  modified_base (5)..(5): 2' fluoro-modified a, c, u, g, or other
  modified_base (6)..(6): 2' O-methyl modified a, c, u, g, or other
  modified_base (7)..(7): 2' fluoro-modified a, c, u, g, or other
  modified_base (8)..(8): 2' O-methyl modified a, c, u, g, or other
  modified_base (9)..(9): 2' fluoro-modified a, c, u, g, or other
  modified_base (10)..(10): 2' O-methyl modified a, c, u, g, or other
  modified_base (11)..(11): 2' O-methyl modified a, c, u, g, or other
  modified_base (12)..(12): 2' O-methyl modified a, c, u, g, or other
  modified_base (13)..(13): 2' O-methyl modified a, c, u, g, or other
  modified_base (14)..(14): 2' O-methyl modified a, c, u, g, or other
  modified_base (15)..(15): 2' O-methyl modified a, c, u, g, or other
  modified_base (16)..(16): 2' O-methyl modified a, c, u, g, or other
  modified_base (17)..(17): 2' O-methyl modified a, c, u, g, or other
  modified_base (18)..(18): 2' O-methyl modified a, c, u, g, or other
  modified_base (19)..(19): 2' O-methyl modified a, c, u, g, or other
  misc_feature (19)..(20): Phosphorothioate linkage
  modified_base (20)..(20): 2' O-methyl modified a, c, u, g, or other
  misc_feature (20)..(21): Phosphorothioate linkage
  modified_base (21)..(21): 2' O-methyl modified a, c, u, g, or other
nnnnnnnnnnnnnnnnnnnnn

SEQ ID NO: 6053 - RNA, 21 nt, Artificial Sequence
  Description of Artificial Sequence: Synthetic oligonucleotide
  modified_base (1)..(1): 2' O-methyl modified a, c, u, g, or other
  modified_base (2)..(2): 2' O-methyl modified a, c, u, g, or other
  modified_base (3)..(3): 2' O-methyl modified a, c, u, g, or other
  modified_base (4)..(4): 2' O-methyl modified a, c, u, g, or other
  modified_base (5)..(5): 2' fluoro-modified a, c, u, g, or other
  modified_base (6)..(6): 2' fluoro-modified a, c, u, g, or other
  modified_base (7)..(7): 2' O-methyl modified a, c, u, g, or other
  modified_base (8)..(8): 2' O-methyl modified a, c, u, g, or other
  modified_base (9)..(9): 2' fluoro-modified a, c, u, g, or other
  modified_base (10)..(10): 2' O-methyl modified a, c, u, g, or other
  modified_base (11)..(11): 2' O-methyl modified a, c, u, g, or other
  modified_base (12)..(12): 2' O-methyl modified a, c, u, g, or other
  modified_base (13)..(13): 2' O-methyl modified a, c, u, g, or other
  modified_base (14)..(14): 2' O-methyl modified a, c, u, g, or other
  modified_base (15)..(15): 2' O-methyl modified a, c, u, g, or other
  modified_base (16)..(16): 2' O-methyl modified a, c, u, g, or other
  modified_base (17)..(17): 2' O-methyl modified a, c, u, g, or other
  modified_base (18)..(18): 2' O-methyl modified a, c, u, g, or other
  modified_base (19)..(19): 2' O-methyl modified a, c, u, g, or other
  misc_feature (19)..(20): Phosphorothioate linkage
  modified_base (20)..(20): 2' O-methyl modified a, c, u, g, or other
  misc_feature (20)..(21): Phosphorothioate linkage
  modified_base (21)..(21): 2' O-methyl modified a, c, u, g, or other
nnnnnnnnnnnnnnnnnnnnn

SEQ ID NO: 6054 - RNA, 21 nt, Artificial Sequence
  Description of Artificial Sequence: Synthetic oligonucleotide
  modified_base (1)..(1): 2' O-methyl modified a, c, u, g, or other
  modified_base (2)..(2): 2' O-methyl modified a, c, u, g, or other
  modified_base (3)..(3): 2' O-methyl modified a, c, u, g, or other
  modified_base (4)..(4): 2' O-methyl modified a, c, u, g, or other
  modified_base (5)..(5): 2' fluoro-modified a, c, u, g, or other
  modified_base (6)..(6): 2' fluoro-modified a, c, u, g, or other
  modified_base (7)..(7): 2' O-methyl modified a, c, u, g, or other
  modified_base (8)..(8): 2' fluoro-modified a, c, u, g, or other
  modified_base (9)..(9): 2' fluoro-modified a, c, u, g, or other
  modified_base (10)..(10): 2' O-methyl modified a, c, u, g, or other
  modified_base (11)..(11): 2' O-methyl modified a, c, u, g, or other
  modified_base (12)..(12): 2' O-methyl modified a, c, u, g, or other
  modified_base (13)..(13): 2' O-methyl modified a, c, u, g, or other
  modified_base (14)..(14): 2' O-methyl modified a, c, u, g, or other
  modified_base (15)..(15): 2' O-methyl modified a, c, u, g, or other
  modified_base (16)..(16): 2' O-methyl modified a, c, u, g, or other
  modified_base (17)..(17): 2' O-methyl modified a, c, u, g, or other
  modified_base (18)..(18): 2' O-methyl modified a, c, u, g, or other
  modified_base (19)..(19): 2' O-methyl modified a, c, u, g, or other
  misc_feature (19)..(20): Phosphorothioate linkage
  modified_base (20)..(20): 2' O-methyl modified a, c, u, g, or other
  misc_feature (20)..(21): Phosphorothioate linkage
  modified_base (21)..(21): 2' O-methyl modified a, c, u, g, or other
nnnnnnnnnnnnnnnnnnnnn

SEQ ID NO: 6055 - RNA, 21 nt, Artificial Sequence
  Description of Artificial Sequence: Synthetic oligonucleotide
  5' Phosphorothioate linkage
  modified_base (1)..(1): 2' O-methyl modified a, c, u, g, or other
  modified_base (2)..(2): 2' O-methyl modified a, c, u, g, or other
  modified_base (3)..(3): 2' O-methyl modified a, c, u, g, or other
  modified_base (4)..(4): 2' O-methyl modified a, c, u, g, or other
  modified_base (5)..(5): 2' fluoro-modified a, c, u, g, or other
  modified_base (6)..(6): 2' fluoro-modified a, c, u, g, or other
  modified_base (7)..(7): 2' O-methyl modified a, c, u, g, or other
  modified_base (8)..(8): 2' fluoro-modified a, c, u, g, or other
  modified_base (9)..(9): 2' fluoro-modified a, c, u, g, or other
  modified_base (10)..(10): 2' O-methyl modified a, c, u, g, or other
  modified_base (11)..(11): 2' O-methyl modified a, c, u, g, or other
  modified_base (12)..(12): 2' O-methyl modified a, c, u, g, or other
  modified_base (13)..(13): 2' O-methyl modified a, c, u, g, or other
  modified_base (14)..(14): 2' O-methyl modified a, c, u, g, or other
  modified_base (15)..(15): 2' O-methyl modified a, c, u, g, or other
  modified_base (16)..(16): 2' O-methyl modified a, c, u, g, or other
  modified_base (17)..(17): 2' O-methyl modified a, c, u, g, or other
  modified_base (18)..(18): 2' O-methyl modified a, c, u, g, or other
  modified_base (19)..(19): 2' O-methyl modified a, c, u, g, or other
  misc_feature (19)..(20): Phosphorothioate linkage
  modified_base (20)..(20): 2' O-methyl modified a, c, u, g, or other
  misc_feature (20)..(21): Phosphorothioate linkage
  modified_base (21)..(21): 2' O-methyl modified a, c, u, g, or other
nnnnnnnnnnnnnnnnnnnnn

SEQ ID NO: 6056 - RNA, 21 nt, Artificial Sequence
  Description of Artificial Sequence: Synthetic oligonucleotide
  5' Phosphorothioate linkage
  modified_base (1)..(1): 2' O-methyl modified a, c, u, g, or other
  modified_base (2)..(2): 2' O-methyl modified a, c, u, g, or other
  modified_base (3)..(3): 2' O-methyl modified a, c, u, g, or other
  modified_base (4)..(4): 2' O-methyl modified a, c, u, g, or other
  modified_base (5)..(5): 2' fluoro-modified a, c, u, g, or other
  modified_base (6)..(6): 2' fluoro-modified a, c, u, g, or other
  modified_base (7)..(7): 2' O-methyl modified a, c, u, g, or other
  modified_base (8)..(8): 2' O-methyl modified a, c, u, g, or other
  modified_base (9)..(9): 2' fluoro-modified a, c, u, g, or other
  modified_base (10)..(10): 2' fluoro-modified a, c, u, g, or other
  modified_base (11)..(11): 2' O-methyl modified a, c, u, g, or other
  modified_base (12)..(12): 2' O-methyl modified a, c, u, g, or other
  modified_base (13)..(13): 2' O-methyl modified a, c, u, g, or other
  modified_base (14)..(14): 2' O-methyl modified a, c, u, g, or other
  modified_base (15)..(15): 2' O-methyl modified a, c, u, g, or other
  modified_base (16)..(16): 2' O-methyl modified a, c, u, g, or other
  modified_base (17)..(17): 2' O-methyl modified a, c, u, g, or other
  modified_base (18)..(18): 2' O-methyl modified a, c, u, g, or other
  modified_base (19)..(19): 2' O-methyl modified a, c, u, g, or other
  misc_feature (19)..(20): Phosphorothioate linkage
  modified_base (20)..(20): 2' O-methyl modified a, c, u, g, or other
  misc_feature (20)..(21): Phosphorothioate linkage
  modified_base (21)..(21): 2' O-methyl modified a, c, u, g, or other
nnnnnnnnnnnnnnnnnnnnn

SEQ ID NO: 6057 - RNA, 21 nt, Artificial Sequence
  Description of Artificial Sequence: Synthetic oligonucleotide
  5' Phosphorothioate linkage
  modified_base (1)..(1): 2' O-methyl modified a, c, u, g, or other
  modified_base (2)..(2): 2' O-methyl modified a, c, u, g, or other
  modified_base (3)..(3): 2' O-methyl modified a, c, u, g, or other
  modified_base (4)..(4): 2' O-methyl modified a, c, u, g, or other
  modified_base (5)..(5): 2' fluoro-modified a, c, u, g, or other
  modified_base (6)..(6): 2' O-methyl modified a, c, u, g, or other
  modified_base (7)..(7): 2' fluoro-modified a, c, u, g, or other
  modified_base (8)..(8): 2' O-methyl modified a, c, u, g, or other
  modified_base (9)..(9): 2' fluoro-modified a, c, u, g, or other
  modified_base (10)..(10): 2' O-methyl modified a, c, u, g, or other
  modified_base (11)..(11): 2' O-methyl modified a, c, u, g, or other
  modified_base (12)..(12): 2' O-methyl modified a, c, u, g, or other
  modified_base (13)..(13): 2' O-methyl modified a, c, u, g, or other
  modified_base (14)..(14): 2' O-methyl modified a, c, u, g, or other
  modified_base (15)..(15): 2' O-methyl modified a, c, u, g, or other
  modified_base (16)..(16): 2' O-methyl modified a, c, u, g, or other
  modified_base (17)..(17): 2' O-methyl modified a, c, u, g, or other
  modified_base (18)..(18): 2' O-methyl modified a, c, u, g, or other
  modified_base (19)..(19): 2' O-methyl modified a, c, u, g, or other
  misc_feature (19)..(20): Phosphorothioate linkage
  modified_base (20)..(20): 2' O-methyl modified a, c, u, g, or other
  misc_feature (20)..(21): Phosphorothioate linkage
  modified_base (21)..(21): 2' O-methyl modified a, c, u, g, or other
nnnnnnnnnnnnnnnnnnnnn

SEQ ID NO: 6058 - RNA, 21 nt, Artificial Sequence
  Description of Artificial Sequence: Synthetic oligonucleotide
  5' Phosphorothioate linkage
  modified_base (1)..(1): 2' O-methyl modified a, c, u, g, or other
  modified_base (2)..(2): 2' O-methyl modified a, c, u, g, or other
  modified_base (3)..(3): 2' O-methyl modified a, c, u, g, or other
  modified_base (4)..(4): 2' O-methyl modified a, c, u, g, or other
  modified_base (5)..(5): 2' O-methyl modified a, c, u, g, or other
  modified_base (6)..(6): 2' O-methyl modified a, c, u, g, or other
  modified_base (7)..(7): 2' O-methyl modified a, c, u, g, or other
  modified_base (8)..(8): 2' O-methyl modified a, c, u, g, or other
  modified_base (9)..(9): 2' fluoro-modified a, c, u, g, or other
  modified_base (10)..(10): 2' O-methyl modified a, c, u, g, or other
  modified_base (11)..(11): 2' fluoro-modified a, c, u, g, or other
  modified_base (12)..(12): 2' O-methyl modified a, c, u, g, or other
  modified_base (13)..(13): 2' O-methyl modified a, c, u, g, or other
  modified_base (14)..(14): 2' O-methyl modified a, c, u, g, or other
  modified_base (15)..(15): 2' O-methyl modified a, c, u, g, or other
  modified_base (16)..(16): 2' O-methyl modified a, c, u, g, or other
  modified_base (17)..(17): 2' O-methyl modified a, c, u, g, or other
  modified_base (18)..(18): 2' O-methyl modified a, c, u, g, or other
  modified_base (19)..(19): 2' O-methyl modified a, c, u, g, or other
  misc_feature (19)..(20): Phosphorothioate linkage
  modified_base (20)..(20): 2' O-methyl modified a, c, u, g, or other
  misc_feature (20)..(21): Phosphorothioate linkage
  modified_base (21)..(21): 2' O-methyl modified a, c, u, g, or other
nnnnnnnnnnnnnnnnnnnnn

SEQ ID NO: 6059 - RNA, 21 nt, Artificial Sequence
  Description of Artificial Sequence: Synthetic oligonucleotide
  5' Phosphorothioate linkage
  modified_base (1)..(1): 2' O-methyl modified a, c, u, g, or other
  modified_base (2)..(2): 2' O-methyl modified a, c, u, g, or other
  modified_base (3)..(3): 2' O-methyl modified a, c, u, g, or other
  modified_base (4)..(4): 2' O-methyl modified a, c, u, g, or other
  modified_base (5)..(5): 2' O-methyl modified a, c, u, g, or other
  modified_base (6)..(6): 2' fluoro-modified a, c, u, g, or other
  modified_base (7)..(7): 2' fluoro-modified a, c, u, g, or other
  modified_base (8)..(8): 2' fluoro-modified a, c, u, g, or other
  modified_base (9)..(9): 2' fluoro-modified a, c, u, g, or other
  modified_base (10)..(10): 2' O-methyl modified a, c, u, g, or other
  modified_base (11)..(11): 2' fluoro-modified a, c, u, g, or other
  modified_base (12)..(12): 2' O-methyl modified a, c, u, g, or other
  modified_base (13)..(13): 2' O-methyl modified a, c, u, g, or other
  modified_base (14)..(14): 2' O-methyl modified a, c, u, g, or other
  modified_base (15)..(15): 2' O-methyl modified a, c, u, g, or other
  modified_base (16)..(16): 2' O-methyl modified a, c, u, g, or other
  modified_base (17)..(17): 2' O-methyl modified a, c, u, g, or other
  modified_base (18)..(18): 2' O-methyl modified a, c, u, g, or other
  modified_base (19)..(19): 2' O-methyl modified a, c, u, g, or other
  misc_feature (19)..(20): Phosphorothioate linkage
  modified_base (20)..(20): 2' O-methyl modified a, c, u, g, or other
  misc_feature (20)..(21): Phosphorothioate linkage
  modified_base (21)..(21): 2' O-methyl modified a, c, u, g, or other
nnnnnnnnnnnnnnnnnnnnn

SEQ ID NO: 6060 - RNA, 21 nt, Artificial Sequence
  Description of Artificial Sequence: Synthetic oligonucleotide
  5' Phosphorothioate linkage
  modified_base (1)..(1): 2' O-methyl modified a, c, u, g, or other
  modified_base (2)..(2): 2' O-methyl modified a, c, u, g, or other
  modified_base (3)..(3): 2' O-methyl modified a, c, u, g, or other
  modified_base (4)..(4): 2' O-methyl modified a, c, u, g, or other
  modified_base (5)..(5): 2' O-methyl modified a, c, u, g, or other
  modified_base (6)..(6): 2' O-methyl modified a, c, u, g, or other
  modified_base (7)..(7): 2' fluoro-modified a, c, u, g, or other
  modified_base (8)..(8): 2' O-methyl modified a, c, u, g, or other
  modified_base (9)..(9): 2' fluoro-modified a, c, u, g, or other
  modified_base (10)..(10): 2' O-methyl modified a, c, u, g, or other
  modified_base (11)..(11): 2' fluoro-modified a, c, u, g, or other
  modified_base (12)..(12): 2' O-methyl modified a, c, u, g, or other
  modified_base (13)..(13): 2' O-methyl modified a, c, u, g, or other
  modified_base (14)..(14): 2' O-methyl modified a, c, u, g, or other
  modified_base (15)..(15): 2' O-methyl modified a, c, u, g, or other
  modified_base (16)..(16): 2' O-methyl modified a, c, u, g, or other
  modified_base (17)..(17): 2' O-methyl modified a, c, u, g, or other
  modified_base (18)..(18): 2' O-methyl modified a, c, u, g, or other
  modified_base (19)..(19): 2' O-methyl modified a, c, u, g, or other
  misc_feature (19)..(20): Phosphorothioate linkage
  modified_base (20)..(20): 2' O-methyl modified a, c, u, g, or other
  misc_feature (20)..(21): Phosphorothioate linkage
  modified_base (21)..(21): 2' O-methyl modified a, c, u, g, or other
nnnnnnnnnnnnnnnnnnnnn

SEQ ID NO: 6061 - RNA, 21 nt, Artificial Sequence
  Description of Artificial Sequence: Synthetic oligonucleotide
  5' Phosphorothioate linkage
  modified_base (1)..(1): 2' O-methyl modified a, c, u, g, or other
  modified_base (2)..(2): 2' O-methyl modified a, c, u, g, or other
  modified_base (3)..(3): 2' O-methyl modified a, c, u, g, or other
  modified_base (4)..(4): 2' O-methyl modified a, c, u, g, or other
  modified_base (5)..(5): 2' fluoro-modified a, c, u, g, or other
  modified_base (6)..(6): 2' O-methyl modified a, c, u, g, or other
  modified_base (7)..(7): 2' fluoro-modified a, c, u, g, or other
  modified_base (8)..(8): 2' O-methyl modified a, c, u, g, or other
  modified_base (9)..(9): 2' fluoro-modified a, c, u, g, or other
  modified_base (10)..(10): 2' O-methyl modified a, c, u, g, or other
  modified_base (11)..(11): 2' fluoro-modified a, c, u, g, or other
  modified_base (12)..(12): 2' O-methyl modified a, c, u, g, or other
  modified_base (13)..(13): 2' O-methyl modified a, c, u, g, or other
  modified_base (14)..(14): 2' O-methyl modified a, c, u, g, or other
  modified_base (15)..(15): 2' O-methyl modified a, c, u, g, or other
  modified_base (16)..(16): 2' O-methyl modified a, c, u, g, or other
  modified_base (17)..(17): 2' O-methyl modified a, c, u, g, or other
  modified_base (18)..(18): 2' O-methyl modified a, c, u, g, or other
  modified_base (19)..(19): 2' O-methyl modified a, c, u, g, or other
  misc_feature (19)..(20): Phosphorothioate linkage
  modified_base (20)..(20): 2' O-methyl modified a, c, u, g, or other
  misc_feature (20)..(21): Phosphorothioate linkage
  modified_base (21)..(21): 2' O-methyl modified a, c, u, g, or other
nnnnnnnnnnnnnnnnnnnnn

SEQ ID NO: 6062 - RNA, 21 nt, Artificial Sequence
  Description of Artificial Sequence: Synthetic oligonucleotide
  5' Phosphorothioate linkage
  modified_base (1)..(1): 2' O-methyl modified a, c, u, g, or other
  modified_base (2)..(2): 2' O-methyl modified a, c, u, g, or other
  modified_base (3)..(3): 2' O-methyl modified a, c, u, g, or other
  modified_base (4)..(4): 2' O-methyl modified a, c, u, g, or other
  modified_base (5)..(5): 2' O-methyl modified a, c, u, g, or other
  modified_base (6)..(6): 2' O-methyl modified a, c, u, g, or other
  modified_base (7)..(7): 2' O-methyl modified a, c, u, g, or other
  modified_base (8)..(8): 2' O-methyl modified a, c, u, g, or other
  modified_base (9)..(9): 2' fluoro-modified a, c, u, g, or other
  modified_base (10)..(10): 2' fluoro-modified a, c, u, g, or other
  modified_base (11)..(11): 2' O-methyl modified a, c, u, g, or other
  modified_base (12)..(12): 2' O-methyl modified a, c, u, g, or other
  modified_base (13)..(13): 2' O-methyl modified a, c, u, g, or other
  modified_base (14)..(14): 2' O-methyl modified a, c, u, g, or other
  modified_base (15)..(15): 2' O-methyl modified a, c, u, g, or other
  modified_base (16)..(16): 2' O-methyl modified a, c, u, g, or other
  modified_base (17)..(17): 2' O-methyl modified a, c, u, g, or other
  modified_base (18)..(18): 2' O-methyl modified a, c, u, g, or other
  modified_base (19)..(19): 2' O-methyl modified a, c, u, g, or other
  misc_feature (19)..(20): Phosphorothioate linkage
  modified_base (20)..(20): 2' O-methyl modified a, c, u, g, or other
  misc_feature (20)..(21): Phosphorothioate linkage
  modified_base (21)..(21): 2' O-methyl modified a, c, u, g, or other
nnnnnnnnnnnnnnnnnnnnn

SEQ ID NO: 6063 - RNA, 21 nt, Artificial Sequence
  Description of Artificial Sequence: Synthetic oligonucleotide
  5' Phosphorothioate linkage
  modified_base (1)..(1): 2' O-methyl modified a, c, u, g, or other
  modified_base (2)..(2): 2' O-methyl modified a, c, u, g, or other
  modified_base (3)..(3): 2' O-methyl modified a, c, u, g, or other
  modified_base (4)..(4): 2' O-methyl modified a, c, u, g, or other
  modified_base (5)..(5): 2' fluoro-modified a, c, u, g, or other
  modified_base (6)..(6): 2' O-methyl modified a, c, u, g, or other
  modified_base (7)..(7): 2' O-methyl modified a, c, u, g, or other
  modified_base (8)..(8): 2' fluoro-modified a, c, u, g, or other
  modified_base (9)..(9): 2' fluoro-modified a, c, u, g, or other
  modified_base (10)..(10): 2' O-methyl modified a, c, u, g, or other
  modified_base (11)..(11): 2' fluoro-modified a, c, u, g, or other
  modified_base (12)..(12): 2' O-methyl modified a, c, u, g, or other
  modified_base (13)..(13): 2' O-methyl modified a, c, u, g, or other
  modified_base (14)..(14): 2' O-methyl modified a, c, u, g, or other
  modified_base (15)..(15): 2' O-methyl modified a, c, u, g, or other
  modified_base (16)..(16): 2' O-methyl modified a, c, u, g, or other
  modified_base (17)..(17): 2' O-methyl modified a, c, u, g, or other
  modified_base (18)..(18): 2' O-methyl modified a, c, u, g, or other
  modified_base (19)..(19): 2' O-methyl modified a, c, u, g, or other
  misc_feature (19)..(20): Phosphorothioate linkage
  modified_base (20)..(20): 2' O-methyl modified a, c, u, g, or other
  misc_feature (20)..(21): Phosphorothioate linkage
  modified_base (21)..(21): 2' O-methyl modified a, c, u, g, or other
nnnnnnnnnnnnnnnnnnnnn

SEQ ID NO: 6064 - RNA, 21 nt, Artificial Sequence
  Description of Artificial Sequence: Synthetic oligonucleotide
  5' Phosphorothioate linkage
  modified_base (1)..(1): 2' O-methyl modified a, c, u, g, or other
  modified_base (2)..(2): 2' O-methyl modified a, c, u, g, or other
  modified_base (3)..(3): 2' O-methyl modified a, c, u, g, or other
  modified_base (4)..(4): 2' O-methyl modified a, c, u, g, or other
  modified_base (5)..(5): 2' O-methyl modified a, c, u, g, or other
  modified_base (6)..(6): 2' fluoro-modified a, c, u, g, or other
  modified_base (7)..(7): 2' fluoro-modified a, c, u, g, or other
  modified_base (8)..(8): 2' O-methyl modified a, c, u, g, or other
  modified_base (9)..(9): 2' fluoro-modified a, c, u, g, or other
  modified_base (10)..(10): 2' O-methyl modified a, c, u, g, or other
  modified_base (11)..(11): 2' fluoro-modified a, c, u, g, or other
  modified_base (12)..(12): 2' O-methyl modified a, c, u, g, or other
  modified_base (13)..(13): 2' O-methyl modified a, c, u, g, or other
  modified_base (14)..(14): 2' O-methyl modified a, c, u, g, or other
  modified_base (15)..(15): 2' O-methyl modified a, c, u, g, or other
  modified_base (16)..(16): 2' O-methyl modified a, c, u, g, or other
  modified_base (17)..(17): 2' O-methyl modified a, c, u, g, or other
  modified_base (18)..(18): 2' O-methyl modified a, c, u, g, or other
  modified_base (19)..(19): 2' O-methyl modified a, c, u, g, or other
  misc_feature (19)..(20): Phosphorothioate linkage
  modified_base (20)..(20): 2' O-methyl modified a, c, u, g, or other
  misc_feature (20)..(21): Phosphorothioate linkage
  modified_base (21)..(21): 2' O-methyl modified a, c, u, g, or other
nnnnnnnnnnnnnnnnnnnnn

SEQ ID NO: 6065 - RNA, 21 nt, Artificial Sequence
  Description of Artificial Sequence: Synthetic oligonucleotide
  modified_base (1)..(1): 2' O-methyl modified a, c, u, g, or other
  misc_feature (1)..(2): Phosphorothioate linkage
  modified_base (2)..(2): 2' fluoro-modified a, c, u, g, or other
  misc_feature (2)..(3): Phosphorothioate linkage
  modified_base (3)..(3): 2' O-methyl modified a, c, u, g, or other
  modified_base (4)..(4): 2' fluoro-modified a, c, u, g, or other
  modified_base (5)..(5): 2' O-methyl modified a, c, u, g, or other
  modified_base (6)..(6): 2' fluoro-modified a, c, u, g, or other
  modified_base (7)..(7): 2' O-methyl modified a, c, u, g, or other
  modified_base (8)..(8): 2' fluoro-modified a, c, u, g, or other
  modified_base (9)..(9): 2' O-methyl modified a, c, u, g, or other
  modified_base (10)..(10): 2' fluoro-modified a, c, u, g, or other
  modified_base (11)..(11): 2' O-methyl modified a, c, u, g, or other
  modified_base (12)..(12): 2' O-methyl modified a, c, u, g, or other
  modified_base (13)..(13): 2' O-methyl modified a, c, u, g, or other
  modified_base (14)..(14): 2' fluoro-modified a, c, u, g, or other
  modified_base (15)..(15): 2' O-methyl modified a, c, u, g, or other
  modified_base (16)..(16): 2' fluoro-modified a, c, u, g, or other
  modified_base (17)..(17): 2' O-methyl modified a, c, u, g, or other
  modified_base (18)..(18): 2' fluoro-modified a, c, u, g, or other
  modified_base (19)..(19): 2' O-methyl modified a, c, u, g, or other
  misc_feature (19)..(20): Phosphorothioate linkage
  modified_base (20)..(20): 2' O-methyl modified a, c, u, g, or other
  misc_feature (20)..(21): Phosphorothioate linkage
  modified_base (21)..(21): 2' O-methyl modified a, c, u, g, or other
nnnnnnnnnnnnnnnnnnnnn

SEQ ID NO: 6066 - RNA, 21 nt, Artificial Sequence
  Description of Artificial Sequence: Synthetic oligonucleotide
  modified_base (1)..(1): 2' O-methyl modified a, c, u, g, or other
  misc_feature (1)..(2): Phosphorothioate linkage
  modified_base (2)..(2): 2' fluoro-modified a, c, u, g, or other
  misc_feature (2)..(3): Phosphorothioate linkage
  modified_base (3)..(3): 2' O-methyl modified a, c, u, g, or other
  modified_base (4)..(4): 2' O-methyl modified a, c, u, g, or other
  modified_base (5)..(5): 2' O-methyl modified a, c, u, g, or other
  modified_base (6)..(6): 2' fluoro-modified a, c, u, g, or other
  modified_base (7)..(7): 2' O-methyl modified a, c, u, g, or other
  modified_base (8)..(8): 2' fluoro-modified a, c, u, g, or other
  modified_base (9)..(9): 2' fluoro-modified a, c, u, g, or other
  modified_base (10)..(10): 2' O-methyl modified a, c, u, g, or other
  modified_base (11)..(11): 2' O-methyl modified a, c, u, g, or other
  modified_base (12)..(12): 2' O-methyl modified a, c, u, g, or other
  modified_base (13)..(13): 2' O-methyl modified a, c, u, g, or other
  modified_base (14)..(14): 2' fluoro-modified a, c, u, g, or other
  modified_base (15)..(15): 2' O-methyl modified a, c, u, g, or other
  modified_base (16)..(16): 2' fluoro-modified a, c, u, g, or other
  modified_base (17)..(17): 2' O-methyl modified a, c, u, g, or other
  modified_base (18)..(18): 2' O-methyl modified a, c, u, g, or other
  modified_base (19)..(19): 2' O-methyl modified a, c, u, g, or other
  misc_feature (19)..(20): Phosphorothioate linkage
  modified_base (20)..(20): 2' O-methyl modified a, c, u, g, or other
  misc_feature (20)..(21): Phosphorothioate linkage
  modified_base (21)..(21): 2' O-methyl modified a, c, u, g, or other
nnnnnnnnnnnnnnnnnnnnn

SEQ ID NO: 6067 - RNA, 21 nt, Artificial Sequence
  Description of Artificial Sequence: Synthetic oligonucleotide
  modified_base (1)..(1): 2' O-methyl modified a, c, u, g, or other
  misc_feature (1)..(2): Phosphorothioate linkage
  modified_base (2)..(2): 2' fluoro-modified a, c, u, g, or other
  misc_feature (2)..(3): Phosphorothioate linkage
  modified_base (3)..(3): 2' O-methyl modified a, c, u, g, or other
  modified_base (4)..(4): 2' O-methyl modified a, c, u, g, or other
  modified_base (5)..(5): 2' O-methyl modified a, c, u, g, or other
  modified_base (6)..(6): 2' fluoro-modified a, c, u, g, or other
  modified_base (7)..(7): 2' O-methyl modified a, c, u, g, or other
  modified_base (8)..(8): 2' O-methyl modified a, c, u, g, or other
  modified_base (9)..(9): 2' O-methyl modified a, c, u, g, or other
  modified_base (10)..(10): 2' O-methyl modified a, c, u, g, or other
  modified_base (11)..(11): 2' O-methyl modified a, c, u, g, or other
  modified_base (12)..(12): 2' O-methyl modified a, c, u, g, or other
  modified_base (13)..(13): 2' O-methyl modified a, c, u, g, or other
  modified_base (14)..(14): 2' fluoro-modified a, c, u, g, or other
  modified_base (15)..(15): 2' O-methyl modified a, c, u, g, or other
  modified_base (16)..(16): 2' fluoro-modified a, c, u, g, or other
  modified_base (17)..(17): 2' O-methyl modified a, c, u, g, or other
  modified_base (18)..(18): 2' O-methyl modified a, c, u, g, or other
  modified_base (19)..(19): 2' O-methyl modified a, c, u, g, or other
  misc_feature (19)..(20): Phosphorothioate linkage
  modified_base (20)..(20): 2' O-methyl modified a, c, u, g, or other
  misc_feature (20)..(21): Phosphorothioate linkage
  modified_base (21)..(21): 2' O-methyl modified a, c, u, g, or other
nnnnnnnnnnnnnnnnnnnnn

SEQ ID NO: 6068 - RNA, 21 nt, Artificial Sequence
  Description of Artificial Sequence: Synthetic oligonucleotide
  modified_base (1)..(1): 2' O-methyl modified a, c, u, g, or other
  misc_feature (1)..(2): Phosphorothioate linkage
  modified_base (2)..(2): 2' fluoro-modified a, c, u, g, or other
  misc_feature (2)..(3): Phosphorothioate linkage
  modified_base (3)..(3): 2' O-methyl modified a, c, u, g, or other
  modified_base (4)..(4): 2' fluoro-modified a, c, u, g, or other
  modified_base (5)..(5): 2' O-methyl modified a, c, u, g, or other
  modified_base (6)..(6): 2' fluoro-modified a, c, u, g, or other
  modified_base (7)..(7): 2' O-methyl modified a, c, u, g, or other
  modified_base (8)..(8): 2' O-methyl modified a, c, u, g, or other
  modified_base (9)..(9): 2' O-methyl modified a, c, u, g, or other
  modified_base (10)..(10): 2' O-methyl modified a, c, u, g, or other
  modified_base (11)..(11): 2' O-methyl modified a, c, u, g, or other
  modified_base (12)..(12): 2' O-methyl modified a, c, u, g, or other
  modified_base (13)..(13): 2' O-methyl modified a, c, u, g, or other
  modified_base (14)..(14): 2' fluoro-modified a, c, u, g, or other
  modified_base (15)..(15): 2' O-methyl modified a, c, u, g, or other
  modified_base (16)..(16): 2' fluoro-modified a, c, u, g, or other
  modified_base (17)..(17): 2' O-methyl modified a, c, u, g, or other
  modified_base (18)..(18): 2' O-methyl modified a, c, u, g, or other
  modified_base (19)..(19): 2' O-methyl modified a, c, u, g, or other
  misc_feature (19)..(20): Phosphorothioate linkage
  modified_base (20)..(20): 2' O-methyl modified a, c, u, g, or other
  misc_feature (20)..(21): Phosphorothioate linkage
  modified_base (21)..(21): 2' O-methyl modified a, c, u, g, or other
nnnnnnnnnnnnnnnnnnnnn

SEQ ID NO: 6069 - RNA, 21 nt, Artificial Sequence
  Description of Artificial Sequence: Synthetic oligonucleotide
  modified_base (1)..(1): 2' O-methyl modified a, c, u, g, or other
  misc_feature (1)..(2): Phosphorothioate linkage
  modified_base (2)..(2): 2' fluoro-modified a, c, u, g, or other
  misc_feature (2)..(3): Phosphorothioate linkage
  modified_base (3)..(3): 2' O-methyl modified a, c, u, g, or other
  modified_base (4)..(4): 2' O-methyl modified a, c, u, g, or other
  modified_base (5)..(5): 2' O-methyl modified a, c, u, g, or other
  modified_base (6)..(6): 2' O-methyl modified a, c, u, g, or other
  modified_base (7)..(7): 2' O-methyl modified a, c, u, g, or other
  modified_base (8)..(8): 2' O-methyl modified a, c, u, g, or other
  modified_base (9)..(9): 2' O-methyl modified a, c, u, g, or other
  modified_base (10)..(10): 2' O-methyl modified a, c, u, g, or other
  modified_base (11)..(11): 2' O-methyl modified a, c, u, g, or other
  modified_base (12)..(12): 2' O-methyl modified a, c, u, g, or other
  modified_base (13)..(13): 2' O-methyl modified a, c, u, g, or other
  modified_base (14)..(14): 2' fluoro-modified a, c, u, g, or other
  modified_base (15)..(15): 2' O-methyl modified a, c, u, g, or other
  modified_base (16)..(16): 2' fluoro-modified a, c, u, g, or other
  modified_base (17)..(17): 2' O-methyl modified a, c, u, g, or other
  modified_base (18)..(18): 2' O-methyl modified a, c, u, g, or other
  modified_base (19)..(19): 2' O-methyl modified a, c, u, g, or other
  misc_feature (19)..(20): Phosphorothioate linkage
  modified_base (20)..(20): 2' O-methyl modified a, c, u, g, or other
  misc_feature (20)..(21): Phosphorothioate linkage
  modified_base (21)..(21): 2' O-methyl modified a, c, u, g, or other
nnnnnnnnnnnnnnnnnnnnn

SEQ ID NO: 6070 - RNA, 21 nt, Artificial Sequence
  Description of Artificial Sequence: Synthetic oligonucleotide
  modified_base (1)..(1): 2' O-methyl modified a, c, u, g, or other
  misc_feature (1)..(2): Phosphorothioate linkage
  modified_base (2)..(2): 2' fluoro-modified a, c, u, g, or other
  misc_feature (2)..(3): Phosphorothioate linkage
  modified_base (3)..(3): 2' O-methyl modified a, c, u, g, or other
  modified_base (4)..(4): 2' O-methyl modified a, c, u, g, or other
  modified_base (5)..(5): 2' O-methyl modified a, c, u, g, or other
  modified_base (6)..(6): 2' fluoro-modified a, c, u, g, or other
  modified_base (7)..(7): 2' O-methyl modified a, c, u, g, or other
  modified_base (8)..(8): 2' O-methyl modified a, c, u, g, or other
  modified_base (9)..(9): 2' fluoro-modified a, c, u, g, or other
  modified_base (10)..(10): 2' O-methyl modified a, c, u, g, or other
  modified_base (11)..(11): 2' O-methyl modified a, c, u, g, or other
  modified_base (12)..(12): 2' O-methyl modified a, c, u, g, or other
  modified_base (13)..(13): 2' O-methyl modified a, c, u, g, or other
  modified_base (14)..(14): 2' fluoro-modified a, c, u, g, or other
  modified_base (15)..(15): 2' O-methyl modified a, c, u, g, or other
  modified_base (16)..(16): 2' fluoro-modified a, c, u, g, or other
  modified_base (17)..(17): 2' O-methyl modified a, c, u, g, or other
  modified_base (18)..(18): 2' O-methyl modified a, c, u, g, or other
  modified_base (19)..(19): 2' O-methyl modified a, c, u, g, or other
  misc_feature (19)..(20): Phosphorothioate linkage
  modified_base (20)..(20): 2' O-methyl modified a, c, u, g, or other
  misc_feature (20)..(21): Phosphorothioate linkage
  modified_base (21)..(21): 2' O-methyl modified a, c, u, g, or other
nnnnnnnnnnnnnnnnnnnnn

SEQ ID NO: 6071 - RNA, 21 nt, Artificial Sequence
  Description of Artificial Sequence: Synthetic oligonucleotide
  modified_base (1)..(1): 2' O-methyl modified a, c, u, g, or other
  misc_feature (1)..(2): Phosphorothioate linkage
  modified_base (2)..(2): 2' fluoro-modified a, c, u, g, or other
  misc_feature (2)..(3): Phosphorothioate linkage
  modified_base (3)..(3): 2' O-methyl modified a, c, u, g, or other
  modified_base (4)..(4): 2' fluoro-modified a, c, u, g, or other
  modified_base (5)..(5): 2' O-methyl modified a, c, u, g, or other
  modified_base (6)..(6): 2' fluoro-modified a, c, u, g, or other
  modified_base (7)..(7): 2' O-methyl modified a, c, u, g, or other
  modified_base (8)..(8): 2' fluoro-modified a, c, u, g, or other
  modified_base (9)..(9): 2' O-methyl modified a, c, u, g, or other
  modified_base (10)..(10): 2' fluoro-modified a, c, u, g, or other
  modified_base (11)..(11): 2' O-methyl modified a, c, u, g, or other
  modified_base (12)..(12): 2' fluoro-modified a, c, u, g, or other
  modified_base (13)..(13): 2' O-methyl modified a, c, u, g, or other
  modified_base (14)..(14): 2' fluoro-modified a, c, u, g, or other
  modified_base (15)..(15): 2' O-methyl modified a, c, u, g, or other
  modified_base (16)..(16): 2' fluoro-modified a, c, u, g, or other
  modified_base (17)..(17): 2' O-methyl modified a, c, u, g, or other
  modified_base (18)..(18): 2' fluoro-modified a, c, u, g, or other
  modified_base (19)..(19): 2' O-methyl modified a, c, u, g, or other
  misc_feature (19)..(20): Phosphorothioate linkage
  modified_base (20)..(20): 2' O-methyl modified a, c, u, g, or other
  misc_feature (20)..(21): Phosphorothioate linkage
  modified_base (21)..(21): 2' O-methyl modified a, c, u, g, or other
nnnnnnnnnnnnnnnnnnnnn

SEQ ID NO: 6072 - RNA, 21 nt, Artificial Sequence
  Description of Artificial Sequence: Synthetic oligonucleotide
  modified_base (1)..(1): 2' O-methyl modified a, c, u, g, or other
  misc_feature (1)..(2): Phosphorothioate linkage
  modified_base (2)..(2): 2' fluoro-modified a, c, u, g, or other
  misc_feature (2)..(3): Phosphorothioate linkage
  modified_base (3)..(3): 2' O-methyl modified a, c, u, g, or other
  modified_base (4)..(4): 2' O-methyl modified a, c, u, g, or other
  modified_base (5)..(5): 2' O-methyl modified a, c, u, g, or other
  modified_base (6)..(6): 2' O-methyl modified a, c, u, g, or other
  modified_base (7)..(7): 2' O-methyl modified a, c, u, g, or other
  modified_base (8)..(8): 2' O-methyl modified a, c, u, g, or other
  modified_base (9)..(9): 2' O-methyl modified a, c, u, g, or other
  modified_base (10)..(10): 2' O-methyl modified a, c, u, g, or other
  modified_base (11)..(11): 2' O-methyl modified a, c, u, g, or other
  modified_base (12)..(12): 2' O-methyl modified a, c, u, g, or other
  modified_base (13)..(13): 2' O-methyl modified a, c, u, g, or other
  modified_base (14)..(14): 2' fluoro-modified a, c, u, g, or other
  modified_base (15)..(15): 2' O-methyl modified a, c, u, g, or other
  modified_base (16)..(16): 2' O-methyl modified a, c, u, g, or other
  modified_base (17)..(17): 2' O-methyl modified a, c, u, g, or other
  modified_base (18)..(18): 2' O-methyl modified a, c, u, g, or other
  modified_base (19)..(19): 2' O-methyl modified a, c, u, g, or other
  misc_feature (19)..(20): Phosphorothioate linkage
  modified_base (20)..(20): 2' O-methyl modified a, c, u, g, or other
  misc_feature (20)..(21): Phosphorothioate linkage
  modified_base (21)..(21): 2' O-methyl modified a, c, u, g, or other
nnnnnnnnnnnnnnnnnnnnn

SEQ ID NO: 6073 - RNA, 21 nt, Artificial Sequence
  Description of Artificial Sequence: Synthetic oligonucleotide
  5' 5Vp
  modified_base (1)..(1): 2' O-methyl modified a, c, u, g, or other
  misc_feature (1)..(2): Phosphorothioate linkage
  modified_base (2)..(2): 2' fluoro-modified a, c, u, g, or other
  misc_feature (2)..(3): Phosphorothioate linkage
  modified_base (3)..(3): 2' O-methyl modified a, c, u, g, or other
  modified_base (4)..(4): 2' fluoro-modified a, c, u, g, or other
  modified_base (5)..(5): 2' O-methyl modified a, c, u, g, or other
  modified_base (6)..(6): 2' fluoro-modified a, c, u, g, or other
  modified_base (7)..(7): 2' O-methyl modified a, c, u, g, or other
  modified_base (8)..(8): 2' fluoro-modified a, c, u, g, or other
  modified_base (9)..(9): 2' O-methyl modified a, c, u, g, or other
  modified_base (10)..(10): 2' fluoro-modified a, c, u, g, or other
  modified_base (11)..(11): 2' O-methyl modified a, c, u, g, or other
  modified_base (12)..(12): 2' fluoro-modified a, c, u, g, or other
  modified_base (13)..(13): 2' O-methyl modified a, c, u, g, or other
  modified_base (14)..(14): 2' fluoro-modified a, c, u, g, or other
  modified_base (15)..(15): 2' O-methyl modified a, c, u, g, or other
  modified_base (16)..(16): 2' fluoro-modified a, c, u, g, or other
  modified_base (17)..(17): 2' O-methyl modified a, c, u, g, or other
  modified_base (18)..(18): 2' fluoro-modified a, c, u, g, or other
  modified_base (19)..(19): 2' O-methyl modified a, c, u, g, or other
  misc_feature (19)..(20): Phosphorothioate linkage
  modified_base (20)..(20): 2' O-methyl modified a, c, u, g, or other
  misc_feature (20)..(21): Phosphorothioate linkage
  modified_base (21)..(21): 2' O-methyl modified a, c, u, g, or other
nnnnnnnnnnnnnnnnnnnnn

SEQ ID NO: 6074 - RNA, 21 nt, Artificial Sequence
  Description of Artificial Sequence: Synthetic oligonucleotide
  modified_base (1)..(1): 2' O-methyl modified a, c, u, g, or other
  misc_feature (1)..(2): Phosphorothioate linkage
  modified_base (2)..(2): 2' O-methyl modified a, c, u, g, or other
  misc_feature (2)..(3): Phosphorothioate linkage
  modified_base (3)..(3): 2' O-methyl modified a, c, u, g, or other
  modified_base (4)..(4): 2' fluoro-modified a, c, u, g, or other
  modified_base (5)..(5): 2' O-methyl modified a, c, u, g, or other
  modified_base (6)..(6): 2' fluoro-modified a, c, u, g, or other
  modified_base (7)..(7): 2' O-methyl modified a, c, u, g, or other
  modified_base (8)..(8): 2' fluoro-modified a, c, u, g, or other
  modified_base (9)..(9): 2' O-methyl modified a, c, u, g, or other
  modified_base (10)..(10): 2' fluoro-modified a, c, u, g, or other
  modified_base (11)..(11): 2' O-methyl modified a, c, u, g, or other
  modified_base (12)..(12): 2' fluoro-modified a, c, u, g, or other
  modified_base (13)..(13): 2' O-methyl modified a, c, u, g, or other
  modified_base (14)..(14): 2' fluoro-modified a, c, u, g, or other
  modified_base (15)..(15): 2' O-methyl modified a, c, u, g, or other
  modified_base (16)..(16): 2' fluoro-modified a, c, u, g, or other
  modified_base (17)..(17): 2' O-methyl modified a, c, u, g, or other
  modified_base (18)..(18): 2' fluoro-modified a, c, u, g, or other
  modified_base (19)..(19): 2' O-methyl modified a, c, u, g, or other
  misc_feature (19)..(20): Phosphorothioate linkage
  modified_base (20)..(20): 2' O-methyl modified a, c, u, g, or other
  misc_feature (20)..(21): Phosphorothioate linkage
  modified_base (21)..(21): 2' O-methyl modified a, c, u, g, or other
nnnnnnnnnnnnnnnnnnnnn

SEQ ID NO: 6075 - DNA, 20 bp, Artificial Sequence
  Description of Artificial Sequence: Synthetic oligonucleotide
  Description of Combined DNA/RNA Molecule: Synthetic oligonucleotide
  modified_base (1)..(1): 2' O-methyl modified a, c, u, g, or other
  misc_feature (1)..(2): Phosphorothioate linkage
  modified_base (2)..(2): 2' O-methyl modified a, c, u, g, or other
  misc_feature (2)..(3): Phosphorothioate linkage
  modified_base (3)..(3): 2' O-methyl modified a, c, u, g, or other
  misc_feature (3)..(4): Phosphorothioate linkage
  modified_base (4)..(4): 2' O-methyl modified a, c, u, g, or other
  misc_feature (4)..(5): Phosphorothioate linkage
  modified_base (5)..(5): 2' O-methyl modified a, c, u, g, or other
  misc_feature (5)..(6): Phosphorothioate linkage
  modified_base (6)..(6): 2' deoxy-modified a, c, u, g, or other
  misc_feature (6)..(7): Phosphorothioate linkage
  modified_base (7)..(7): 2' deoxy-modified a, c, u, g, or other
  misc_feature (7)..(8): Phosphorothioate linkage
  modified_base (8)..(8): 2' deoxy-modified a, c, u, g, or other
  misc_feature (8)..(9): Phosphorothioate linkage
  modified_base (9)..(9): 2' deoxy-modified a, c, u, g, or other
  misc_feature (9)..(10): Phosphorothioate linkage
  modified_base (10)..(10): 2' deoxy-modified a, c, u, g, or other
  misc_feature (10)..(11): Phosphorothioate linkage
  modified_base (11)..(11): 2' deoxy-modified a, c, u, g, or other
  misc_feature (11)..(12): Phosphorothioate linkage
  modified_base (12)..(12): 2' deoxy-modified a, c, u, g, or other
  misc_feature (12)..(13): Phosphorothioate linkage
  modified_base (13)..(13): 2' deoxy-modified a, c, u, g, or other
  misc_feature (13)..(14): Phosphorothioate linkage
  modified_base (14)..(14): 2' deoxy-modified a, c, u, g, or other
  misc_feature (14)..(15): Phosphorothioate linkage
  modified_base (15)..(15): 2' deoxy-modified a, c, u, g, or other
  misc_feature (15)..(16): Phosphorothioate linkage
  modified_base (16)..(16): 2' O-methyl modified a, c, u, g, or other
  misc_feature (16)..(17): Phosphorothioate linkage
  modified_base (17)..(17): 2' O-methyl modified a, c, u, g, or other
  misc_feature (17)..(18): Phosphorothioate linkage
  modified_base (18)..(18): 2' O-methyl modified a, c, u, g, or other
  misc_feature (18)..(19): Phosphorothioate linkage
  modified_base (19)..(19): 2' O-methyl modified a, c, u, g, or other
  misc_feature (19)..(20): Phosphorothioate linkage
  modified_base (20)..(20): 2' O-methyl modified a, c, u, g, or other
nnnnnnnnnnnnnnnnnnnn
